United States Patent Application Publication US 2007/0054278 A1 - sequence listing, part 97

SEQ ID NO: 97344 - DNA, 690445 bp, Homo sapiens
  misc_feature (1)...(690445): n = A,T,C or G
gaggtcagaagatcttggtttcagcaccagctctgtcaaataactttacggtgtgtccttgggccagtcatttctaagttagaggttcttcacttaaatctcaaagtctgaagttcaatatgaaaatgtctcagagtaattcttttataagatataaatttctgataattaacatacttctaaaaggacttttaatggaagtttatctttaaaaaaggtaattccttaccaggttttttttttcaatattaatttgcttacttgtttttatatctggtaattttctgttcaattcatgtgaattattaaactatgaattaatggaatttgaatctatgagatgtcatggaattaggctagttaaaatatgatttttggaagaaaaaccaagtttcagctcagcccattctctattacttaaatgttgaatagatccaaatgttacagattcatattttatttgctattttgttaccttcactgagtttccaaaagttctctttaggcacaagactcatggtggtatttaacaaacagtaatatatgccaatgtatattagtgcattaatgaatgaatttaggtaaggagacagcaataaaaatttaagccattctttgagaatgagtatgatgaatttaatgataaaggaagtaacagacagaagggaaatcccacaactactttcaagttcttctcagtcctggcctcggaggaaaatttaatataaacctacttaccttttcccgggccaaccatttctccagtacaagaagccagacccaggctactctttgagggttgatgtcctgcccacatctgaaaaaggtaaaaagaaagacttgtaaaaaagagtttctactgatctttcatcttttgtcatccaagacagatttcattgcttattctgttttaaacctgaacaggcaagacactgccctaatgagatatttttaaatgtatatgacagttcagtaaaacattggaaccaggccaggcaaggtggctcacaccggtaatctcagcactttgggaggctgaggtgggtggatcacctgtggtcacgagttcgagaccaacctggccaacataatgaaaccccatctctactaaaaatacaaaaattagccaagtgcggtggcaggcgcctgtagtcccagctactcgggaggctgaggcaggagaatcgcttgaacctgggaggcggaggttgcagtgagcctagatcatgccactgcactccagcctgggtgacagagcaagactctgtctccaaaacaaacaaacaaacaaacaaacaaacaaacaaatcagaaccagaacagagctagcagctttcgtaaaaagccttaatctcacctccacctccttatcttagtttaaaataaaataatattcgagaaaaccataatagctaatactatctgaagcatatttttaatacagaaagtgaatcagacagtcttaaaaaaggaacttcatacaaatttatttttaactatatgctaaaaacaggactttaggaattcataagcctttctttgaagttaggaatttagacggtaactggctagatctcaaattaaaggagaaaaagaaaaggaagggatcacttaagtttctccatcgtatatgtgctaatacaatatgtaaacagtatagcataacagtcaaaggaaggaaaacccaaggaaagacttaaaacggtacatttgactcctacatcaccagtggttactagcatcaccaggaggaacttcattgaaaatcaaggatggagaactgtggttgccagggaacaaggaggggttgttgtataaatacaaagaggtagcaccaaggagtgagggaattcttttgtggtaatggaacagttctgatccttattacagtgggattacatgaatctatatatggataaaactgcataaaactacaaatgaaaaaatgaaggcagattaagaaaatgctgaaaaccaaataaactctgtagtgtcatttaaagtaatgtgccaatgtcaatttcatggttttgatattgtactacagctgtatgagacgtcgcaattggggcagactgggaaaaggatacgctggactccattatttttgcagcttcttgtgagactgcaattatttcgaaataaaaagttttaagtaaagcgacaacaatattttcaatctcataagcaagaagagagcagggtttgcttttttggaggcaaagaaaatagttttcaatgcagttccaccatctatattaacgaggataaacaagaaatggcagtttcaggcacactttggcagccaggcttacattcagttgcagatgataatcaaaagccaatattgactaagtaatggatgtatactatagaggtaaaatttcagagcacgtgaaatacactgtgcctctgcttattcttcagagggtagttgagtgggggcacattgaccaatgcccaaatattgaaccacatgtctctcaccctgggaccgtctggtaggaaaagagatcccttacctcagcagatttggacacaccaccaatgcctgaagtatgtcttctaccctctttgggatatccccttgtccctcctgtagctgaggtacacatgcctgtgccagctcccattctcccctccgcaggcattcgcagaaaaatccaaaaagctgcttctgcgaagcagcttcctcttttccaaatggatgattcattttcccagcacagagtgcagggagatacaaagaaatgagttatgccgaacacattctcaatgttctcattcgcggagtacctcctagaaacaacacaacgccagtgagaagaaacagaaggcactgtattaagacaaagcagcaactactggtccgcctgggaaaggcgggacttgcttgcctaagtatcgttttcagtttaatttcccacgttactttttgaaaacactttcttcaaggggtggatcccatctcttcacgcggattcctatatttaataatattaatagtcatatttgctccgggcgcagacccataactctacgtccgtattccctactgaacgttatgcccagtcttgactccaaatccccaggtggtcgcctcctcaagaatgagaaattcagcaggaacctccctagtttgagccctctgttaaggcagaggattgacgaccaggagacgaatctgtgtcataagtggaaagcagtgtgggggtgggccgcagggacgctctctgcgggggtcgtggagaggggcccctccctctcaggggtgtcttacactcacctgctcccggcgcccaaagcaatagagctctcagcgcagccatgtttgagccgagtcaggtgacagaacccactccgaacagcggtggtgggggtggtgacaaagactgaaagccccactcctattggctcaaggcagggaagatgaaaattaagtgccatatttgtttgagtcacgtgacgccacctctccgggagtagggaaagctagaaagctcggaaagaggaaatcagctacctggctgcggaccatctccctcaattgtgacagctccggcgctcaatactttcagttctgcattcggccgagcaggtggcaggaagaactgtgaccctggatttttttttttcttccactctcttatctccttaacatgtgaagtcaacatttattgaacgccaaccagtgatggtgttttgccaggcgcgggggatacccggagctaggagaactgggttctcctccattattattctatctactgggctcttttgttccggaactctgcggtctgaatttccatattcttctgcttcactccattcatttatttgcacatttaccctacaactgttaattgaacggtgtgctaggctttattttatttttttagagacagagtctctctgtcgctggagtgcggtggtgtgatctcggctcatggcagcctcgaacttcctggatcaagtaatccttaagcctcagccttcctgtagtagctgggactagaggcgcgcgccactacaccgggcttaggccctattctctaagttgagtaaatggaggtccttcttctcaagggagatgcaggccaaaaattaggagacggtgggctaaattataagacagaagtatgcataagagatcagagagcaaagaatgagcaaaggctttttcgcaaacacaataatctgaaaccaagtcttttgttttgagacagagtctcgctctgtctcccaggctggagtgcaatggcgcgatctcggctcgctgcaacctccgtctcccgggtttaagcgattctcctgcctcagcctcactgtgtagctgggataagcgattcttctgcctcagcctcactgagtagctgggatttacaggcgcgcgccaccacacccggctaatttttgtatttttaatagagacaggggttcaccatgttggccaggctggtctcgaactcctgacctcaggcaatccgcccacctcggcctcccaaagttctgggattacgggcgtgagccaccgttcccagcctgaaaccaactcttgaagtaacggcttactaggtttgctcaccacagctgccttacaccaagccttttgtttggtttccctggtgtgctttaatcacagactctcagctttcctcactatgtgtgtttcaggtttagtaatttcattcagcatttcccaaactatttaatcaccaaagggtggtgaaaagagcaagttaaaacaaacaaaacgttttcttccaaaaactcttctgtgattggtggattgtcctcgattcctgagaaaagtaacatggctttctggcccattaaggttttttttttttttgaggcaatgtctggctcctctcacctcagcctcccaagtagctgggatcacaggtgcctgccaccatgtctggctaatttttgtatgtttagtagaggcggggtttcgccatgttggccaggctggtttcgaaatcctgagctcaagtgatctgcctgcctcagcattccgaagtgaaaccgcctttgcaaaattataactgaggaaattatgacagtgaaagaaatcagacctaaccgactctatcttgcttctaaccgttaagctgtccttgttcattcctgggcgtaggctgaactaactttggggaggaattcagttcatggtttgactctgaaacaaaattgataacagccctttccgaaaagacccacttcttgcctggggaccagtctgcctttgcaggactaacaaattagctacaagtttagaaattacagtttagaggtcatgcagcctctggctccaagagtctgaacctccccaaattgctcccgggggtgacatcactattgcaagccctaagatcagtgcttgagatattttgtagaccctgcactccatggatcagctgacaccactcagaccagtaatttggcgcaaccagttttgccatcacacccaggaacagaagacattaagaaaacctcacttcgaccccttatgattccatctccaacctgaccaatcagcactccccacttcctaagcccctaccagccaaattattggtaaaaactccgatccgcaaatgctcgggacaactgatttaagtaacaataaaacttcagtcttccgcacagctggctctgcgtgaattactctttctgcattgcaattcccctgtcctgataaatcggttctgtctaggcagctggtaaggtgaacccatcgggcagtttcaaaagtgctgggattacaggcatgagccaccgcgcccagcctattttttgtatttttttgtagaggcggaggggtgggggagggtgtctcactatgttgccaaggctagtctcgaactcccaggctcaagtgatcctcccgcctcggtctcccaaagtgctgaaattacgggcgtgagccactgcgtctggcccctttaagccattgtgaaaagtgatgatacacgaaaaaaaagatttccagggccgagagcggtggatcacgcctgtaatcccagcgctttgggaggccgaagcgggcggatcacgaggtcaggaaatcgagaccatcctggctaacacggtgaaaccccgtctctactaaaaatacaaaaaaattagccgggcgtggtggtgggagcctgtagtcccagctactagggaggttgaggcaggagaatggcgtgaacccaggaggcggagcttgcagtgagccgagatcgcgccactgcactccagcctgggcgacagagcgagaccccgtctcaaaaaaaaaaaaaaagaaagaaaaaagaaaaatttccaaacagrgtgttcycttgtttcacattctctttggtgatggtcctgcaacagattttgataatcactatattgagaaactgcttcagattcgatctgttaggctgatcatagtattaactacaattcccagcaagccgcggagccaacctgggcctctgccggcctctgattggatacagtagccagaatgacgactcaatcagtgcttcggttgttgctttgcggcgttttccgcggggaaactgtgtaaagggtggggaaacttgaaagttggatgctgcagacccggtactggaaagtttcatgtggggtgccgttgtggggaagtggggttcgctcattatttcctgctccttccctaggctcgtgggtttcgatattgggggagcggagattttctcttgggtgctggtcacgcccccttaagactcggkatcgtcactaagaaccccgctgtgaattgggggagcttcgggccttcttttggtggggaatgcttggaagctgctcattgttggaaaaagctctttttaggggattctgggtgatgtttccgcctgttgctgcccatcttcctccccagccccttcccgcttcgggcagcctgtcattaggggaagttgagggactctcccacttcaggtggtgttggagagcgtggaatctggagtccggtccctggattcgaatgcgagcttcacaccaattgtcagctgtttaactttgcccaagtttctcaactagttacctcagtatccttatctgtaaagtgaggtaaaatatccgaagcctttggaacagtgtggcacgtaataagggctcaataaatattagctaatattgttcctaaacagttgttgaacatctaacatgaagaattttcttttcttggtggtaaggaggacagggttcattctccagggttgaccgtctcccctcatgtgcaatacacatacgtgctttcgcgcacacatacaccgcaggaatttacgtgctccggtgggggcaaacaaacttgcaagccataatagtattttgataagattatcgaatagatatgtgcgaagttgatgagaacattggagaggaaaagacttgactctggggaaggttttgtggagggaagtcagggagacaggatgcgtgacctaccaatacacataccatgtggctggagggcagatcatgtgagagtcattaaatgatgattgctgaccttaagtactatgtgccacgcactccccgagtcctttaacctccactacagtcatatgaagtagtaaattcatatgactgtaaaacaagggttttaaggaaattaagacactgagaggtgaagtaactgccaggaaggataggaactgaacgttgcaatgtgatgtatgagtgagaaggaagtgagggaccaatttttgatgtttttctctgcgaccctaagaagtttggaatttatcctgtggtctaccagtcccatgggaagtgttaaaggataatcgtgactttttaggaagctactcaaggcaggattgtgacactgatctgacttttgcaggcgaatttggggcttcttcctgtctgcttccatagcacttttaaatagcaattgtaatgcttactgcatggctgtagttatttgtgtgtacctctcttttcatctcaactatgagtattcaaaggggagggaatatgcttaaatgattcttgtaccccagacctcagcagggtgtgtatttaaatgcctgtggaaggagtaaattaaggaacaaatgaatggagtggccagaaacaatatgcaatagtccaggcaagtgatgggagtggccctattaaggcagaaatggcagaattggttgttgttaaagtccttgtagtttagaatttatagttttttgtttgtttgttttttgtttttgatagggtctcagtctgttccccaggctagagtgcagtggcatgaccacagctcactgcaggctcgacctcctgggctcaggtgatcctctcatctcagcctcctgggtagctaggactactacaggtgtgcggcacaatgcccagctaatttttgtatttttttgtggagacaggttctctctatgttgcccaggctggtctcaaactcctgggctcaagcaatttgcctgccttagcctcccaaagtgctgggattgtaggcgtgagctaccttgtgtggcctatggttcttttctttctccttctttttttttttaaattgaatttatcagtctaaatggtgtcattacttgaaactacctgatctgaaaagacactaggcaatattatagcaggtatcacttggttttctactgggggaaacaagtcattgctaacaaattcccatggagagaaatgaggaggatgtatttttgtttgtgagaggtgtgtatgtatgtatattgtgtgtgcgtgtgtgtgtgtgtgagagagagagattgattcagtctgattcagagaatttaggtgttaaatagaaatttgggccatggtattggaaataaacaaatatatacattctcagtatacatatattttcattccaaaatgttacttcttttctgataactatattgctttattccttggatccatgaagagttcctgtttcagttcgttccagaggatacttctttaccatctcaatgagatatacagcttctcctttgtatgcattaagagactcacagtaattcttttttagctctgtgaagataaatctttcatgagcctcatttacccctagcaaggtacaatagtgaaatttaactgcatgtgagaatataagcagctagtgtaataaagaacattttgggccaggtctgatcgctcatgcctgtaatcccagcactttaggaggtcaaggcgagaggatcacttgagcccaggagttcgagaccagcttgggcaacatggcaaaaccctgtctctacaaaaaatacaaaaattgggcaggcatggtgtcgaccctgtctctacaaaaaatacaaaaattagccagacatggtggtgcacgcttgtggtcccagctacttgggaggctgaggtaggaggattgcttgagcccaggagggggaggttgcagtgagctgagatcgagccactgcactccagctggggtgacagagccagacctgtctcgctctctctctctctctatatatatatatttaaaaagaacattttaatactgcagtgataaaatctcatttgattcagaaggtgtgctctgactcctagaaaaaggaagagttaaatatgattatggacttgcagtagagtgtaatggttaagaggataggtttcagaattagactgcctggattcaaattctggatcagttatttatgttttctggtgacaatggactagctaacttttccaggctttagttttctcatatgtaaaaaaggggccaataatctactttccttctagggctattgagaagattaaatgtgataatttagataagttttggaacagtgcctggtatgtggtaggtgctccataaatatacctattgccgttacagtgcaatgtaaattgttacagtgcaatagactttctagtagttctgtttggaaatatgccttgaaagttaattacatttccaaataaaatttatacatgcattgaacattttaagatgctctacaaatgtgaagtggtactatattcatgtagtaaatatcaattaattgtgtgaaattatatttgaggttgccttgtagattttctatgtgcctgtttgacgaacaattgtccctcctatttaaaacatttaaaaaggttctatagcattcctttatcagtaatatttttaacacaatatgtttcattttgcatatggagaaacttgaggaatttttaattttgttttggatagcctattcactatcacttatgttatattctgttgtttttttcatggttcttcttttctttgctggatctggaggcatgggtagcaagaaactaaaacgagtgggtttatcacaagagctgtgtgaccgtctgagtagacatcagatccttacctgtcaggtaaattttatttaacatttttattgakaagttttatgcacaagttaactttataccttaatacctcttaaacttgaaataygaaaatgtaggcttacaaaaaaaagataaatgatggtrcttttccataggctaattgtaaatatcaagcctccttgggtgcatttccaactgctatttcatttacccaaatttagtatttttgcattttgaggggaaagtggtcacggcataaggtgaagtaacagctttactgttttatagttacatgagaaataggactcaaatgaggagatactattcaacatgtatcatttctcttaaaagcaaaagaaattaatagaccattttcttattgatggagcatgagaaatatatagagcggatcttgcatttttaagcaaggtggtgaagcaaatcctccttagcagggtaaataagatttaaaggttttggttggttgtttttgttctttgttgtttttgagactaggttctcatgctgccccagctgatcttgaactcctggccttaagcaatcctccagcctcaactcccagctagctgggattacaggcacacaccactgtgcctggctagatttaaggttttatcttaggattttatcctttttttgtttgtttgtttagagtcagtgtctcactctgttgcccaggctggagtacagtggtgccatatcggctcactgcaatctcctcctccccggttcaagtgattctcctgcttccatctcctgagtagctgggattacaggcacatgccaccacacccagctaatttttggatttttagtagaaacggggtttcaccrtgttggccaggctagtctcaaattcctgatctcaagtgatccgcctccctcagcctcccaaagtgctagcattacagacatgagccaccgtgcctggcctgattttatctttaataagacattttcacagagcattctgcaattttttttttgaattgctttctgtgttaaagataacatcggttcctttgttatacatttaattatttgcatatttatactcggaaacattcttaaaagtatgaaatttgttatttcatcctatagtcagtttcattctttttcaactacraaatattatctctgagtgaacttctagcttagaaagaaactctttcggccgggcacggtggctcacacctgtaatcccagcactttgggaggccgaggtgggcagatcatgaggtcaggagttcgagactagcctggccaatatggtgaactcttgtctctactaaaaataaaaaaaattagccaggcatggtagtgagtgcctgtagtcccagctactcaggagtctcaggcagaagaatcgcttgaacccaggaggtggaggttgcagtgagccgagatcgtgccactgcactccagcctgggcgacagagcaaaactcttgtctcaaaaaaaaaaaaaaaaaaaaaaaaaaaaaggaaagaaactctttcaacctgacactttctgggcatatatttatacccaaattctttttggcacaagtgtagcgctcatacgcacctggattggatgctggtgctatgtgatattatttggtgtatcctctggtatatgccaactaaacaggataattagaagataagtttgtgtcattacaacttttagttaaggcatatttatggggaaaatactacaatgaatgtataaatctttgatctgcgataaattatacttttgtctacataagcagtatcaattgaaggtttccttttaactctagtatctttgttacacatatatgtttaaaatactctctttatgtttctttaggactttttatgtctttccccactggagcttatgaaggtgactggtctgagttatcgaggtgtccatgaacttctatgtatggtcagcagggcctgtgccccaaagatgcaaacggtatatttatattttattatgatttgattatgaatgattcctcatctcattaaacatgtttttttagggatgaggcacatgcagaaatagagatgagtacctcaaaaatactgagttttctactatagaagttagttctctaaggaaaatacatgtgaaaattttttttttcttttttgagacgctctgttgcccaggctggagggcagttgcacgatctcggctcactgtagcctctgcctcctgggttcaagcgattctcctgcctcagcctcctgagtagctgggattacaggcacggtgctaccaagccaacttatttttatattattagtagagatgggatttcaccttattggccaggctggtctcaaacttctgacctcaagtgatctgcttgcgtcgacctcccaaagtcctgggattacaggcgtgagccaccgtgcctagcctatgtgtgaaaaatttatgtagtttataaactcatgggagacaatttctaaatatgggaattagggagcaacagaaagtttttatttttttttctatagccaatagcagtagttcaaaaggtcatctttctctgattgattaggtagtatttgatggcctcatagttaaattataatcttaattttagaatgcccctttctttgatatactgacctttaccatcatcacttgctctagatcataaagtacacataattgtacttgtagttgcttattgattgaataaaaggtaattaaaaatttatcctttactcttaagaaaatttgaagtcttttacaaaagccctcatcaaattgtacattttttcagactttttgtgtcatgactgtagcttttcaaaatgtagatttggagcatgatagaaatatcttgttttctcacagtaagagtttcctaaaattctgttcggtgctttgcaaatgtatttatttatgtggactgtaagtttcttaccttactgccttatattgaaatttactgaacactgaacaatgaagtacaattctctgaagaaggggagaaggaaggaatgttagtgtcactggaaacttctaaaaacaatgaacagatatttgaacaacagatattttctttcttttttttttttttgagatgaggtctgtctctatttctctggctggagtacggtggtgtgatctcggctcagtgcagcctccgcctcctgggctcaagccatcctcccaccgcagcctcccgagtggctgggactacaggtgcacaccaccatgcccaactacgttttgtgttttttgtagagatggggttttgccacatagcctagactgttcttgaacttatgagctcaagtgatcctcccgcctcggcctccccaagtgctgggattacatcagccactgtgcctggccaaacaacagatattttcttttgttcagatttagcttgtgatctgaggaaaatattttaaagacaggatagtcagaaggagaatcagaaytggagttagaaactggcattagtcttagctttatcattgatttcattgcttgaacagctttcttttatgggagaaaacagaagttaaaatactatgcaatgattctgtgactagattcaaattaacttgttattatttygaaggttgtaaagcaccagaaaaacctttaatttgtcatctgtcattctaattagtcaatatccatggcatatttcccgttaataaatagagagcatggtcccgaaattcaactttaatttctacttccatcactaccttcagctgccatcttaatacaattccaaatacagttcaagaaaccatctttctcctatggtttacattcattcttgtagcattccttatatttcagcactgccctaaacactggcttagttttttttttttccaacttttattgtaagttccggggtacatgtgcaggatgtgcaggtttgttacataggtaaatgtgtgccatggtggtttgctgtatggatcatcctatcacctaggtattaagctcagcgtccattagctattcttcctgaagctctccctctcccccacaacctcgcaacaggccccaatgtgtgttgttcccttccgtgtgtccatgtgtccatgtgttctcatcgttcagctcccacttataagtgagaacacacagtttttggttttctgttcttgcattagtttgctgaggatgatggcttccaactccatccatgcccctgcaaaggacataatctcattcctttttatggctgcacagtattccattgtgtatacrtaccacattttctttattcagtctatcattgatgggcatttgggttgatttcatgtctttgctattgtgaatagtgctrcaatgaacatatgtgtgcatgtatatttataatagaatgatttgtattcctttgggtatatacctggtaacggcattgctggttcaaatggtatttctgcctctaggtctttgaggaattgccacactgtcttccacgatggttgaattaatttacactcccaccaacagtgtaaaagcattcctattagtctgcaacctcaccagcatctgttgtttcttgactttttagtaattgccattctgattggtgtgagatggtatctcattgtgattttgatgtgcatttctctaatgatcagtgatgttgagctttttttttctatgtttgttggctgcatgaatgtcttcttttgaaaagtatctgttcatgttcttagcccactttttaatggggttgtttggttttttttttcttgtaaatttgtttaagttccttatagagtctggatattagacctttgtcggatggatagattgaaaaaattttctcccattttctaccatgatagtttcttttgctatgcagaagctctttagtttaattagatcccacttgtcaattttgcttttgttccaattacttttggcatttttgtcatgatatctttgcttgtgcctatgttctgaatggtattgcctagattttcttcaaggttttgttttttttcctatagttttggattttacattcaagtctttaatccattttgagtcaatttttgtgtaaagtgtaaggaaggggtccagtttcagtttcctcatatggctagtcagttctcccagcatcatttgttaaataggcaatcctttccccattgcttgtttttatcaggtttgttgaagataagatggttgtaggtgtgcggtcttatttctgagttcttctgttccattggwctatgtgtctgtttttgtatcagtaccatactgttttggttactagagtcttgtagtatagtttgaagttggatagcatgatgcctgcagcttcattctttttgctttggattgtcttggctatacaggctcctttttggtttcatatgaattttaaaatagctttttaaaattctgtgaagaatgtgaatggtagtttaatgggaatagcattgaatctataaattactttgggcaatatggccattttcatgatattgattcttcctatccatgagcatagaatgtttttccatttgtttgtgtcctctctgatttcttggagcagtggtttgtagttctgcttgaagaggtccttcacatcccttgttagctatatttattgctaggtattttcttttctttctttctttttttttttttgagacagagtcttgctctgtcgccgaggctggagtgcagtggcgcaatcttggctcactgcaagctctgcctcctgggttcacgccactctcctgcctcagcctcccaagtagctgggactacagatgcccacctccacgcctggctaattttttgtatttttagtagagacggggtttcaccatgttagccaggatggtctcgatctcctgacctcatgatccgcccgcctcggcctcccaaagtgctgggattacaggcgtgagccactgtgcccggcccagtattttattttctttgtagcaattgtgaatggagttcattcataatttggctctctgcttgcctgttgttggtgcattggcttagttttagttcatttcttcaggaaattttttttgctcatttattcagtcatttattcttttgacctgtatttactgaatgtcaagcatgtattaggtactttgtcaggcaccaaggctatcatggtgaacaagtttatacagtccagccctcttgtagtttacagtctagtgggggaagccagacattaaaatattaattcagaaataattagttaattataatagtgctaaatcctatgaaggaaaagcataaggtactttgaaactttataatagggattacttagtttgggggtcaggaggacccttgcaaggaagcaatactttagctaaaacatgaaagatgaataggtgagagataggcaaaggagctgggaagggagatgggcagggaagagttattgggcgttgggtataacagatgcaaaggccctgggaagtgaaggagaatggggcttgcgtgagtgggtcataacaacgaagaagagagtggtaagagatgaagccagagaagtaagcaggagtcagattattagggctttgatttggactttattccaagagcaatggaaactcataaaagggtatactgtaatatgtgttttaaaaaaaatcagtcttggacatggacaagtgattgaaaaggagcaataaaatattcacgaagattagttaggtacctattactgtattccaaacaaaaagtgatggtgacttatattattaatgcagaggttatagtgttgattaatatgacagatatttaggagggataatttttgtttttttttgagacagagtctcgcactgttgcccaggctggagtgcagtggtgcgatcttggctcactgcaatctctgccttctgggttccagcaattcttgtgcctaagcctcctcagtagctgggactacagacatgcaccatcacacctggctaatttttgtatttttagtagagatggggttttgccattgtccaggctggtctcaaactgctggcctcaagcaatccacccacctcagcctcccagtgtgctgggattacagatgtgagccactgtgctgagcctaggagagagaattaatgggatttggtgattgtttggctgaggtggtggtgaagtataggaaaatgtcagagatgattctctgacttttgctttgagaaactgagtggtaccatttcctgagatcaggaatactggaagaggagcaggtttgagggaggcagatcatagattcaatttagtacttgtgtaatttttttttttttgagatggagtttcgctcttgtcacccaggctggagtgcaatggtgagatctcggcccaggctcccacgttcaagtgattctcctgcgttagcctcccgagtagctgggattacaggcacccaccactatgcccggttaattttttatatttttagtagagacggtttcagcatgttggccaggctggtctcgaactcgtgacctcaggtgatccacctgcctcagcctcccaaagtgccgggattacaggcgtgaaccaccgcccccggccagtacttgtctaatttaagatgtttataaaacatttagtgaagatgggaaataggcagttaaatatatggacctggactttgaaggcgaggcatgcacgtgggagtcattggtgtaaatatgatagttaaagctatcagaatggatgagtgattgcctataaagtgcatacagtaagacgataagtgtacttaagcctgaaacctgagtgatgccaacagttacaggtcagattagatgataatgagtctgagaagaagcagccaccgaagtagaagaaaaattggtagtgtcatatcacaaaactcttctttgtctcatttatatacatactacttttctgaagttttgttctgttagttcattttattcctttttttgagatggagttttgctcttgttgcccaggctggagtgcagtggcgtgatcttggctcaccgcaacctccgcctcccgggttcaagtgatgatcctgcctcagccccctgagtagctgggattacaggcatgtgctaccatgcccagctaattttttttttttgtatttttagtagagatggggtttctccatgtttgtcagcctggtctggaactccggacctcaggtgatacgccggcctcggcctcccaaaatgctgggattacaggcgtgagccaccacacccagctgattattctttttttgacttaccgaatctattattctagaaattacacttaaaattgtaagtgaagtgctttaattttgacagattgggctgcctttgcatgtttgagaaagtatccccacatgcatccacgttgcctgatgataggttatagaaaaaaatgtctacgtaaggatgccgactgaaatatttcttatatcaaaaaattggaaacaataataataggaaggagataaattatattacatttatkttagggaatattatgtaggcactaaaatctttaaaaaatatttgtttgtttattgatttttacagaggcaaggtcttgctatgatgcccaggctggtcttgaaatcctggctgcaagtgatcctcctgccttagcctcccaaagtgctgggattacaggcatgagccatcatgcccagccaataatttttaataacaggagaaatgcacaggatataaatggttagtgaaaaaagcaggctacaaaattgtatatagtatacatgccaattttataaaaatgaccgttataaaggtatttggtgtatattgttaataatggttatctcaggattgtggaattttttactgttctgttttctttaactttttttttcattccaaatttgctttaggtatgttatgttctttaggaaaaaagcagcaacagttcttgtttgtccccttgcagtaatatctggcaattctcttagtctcagtttttttaccatttgcgaaatggagataattatacctgtgtgtaaatgaaataatgtatgtaaagtacttaatacagcacatagtagatgtgcaacagatgttcattagcttcctgtccttgccttttccttactgttcatgattcctgaatcacagcaatatctaagaggagctgatgttatttgctccatatcctagcatagtgactggacagtgccctggagcaggcaaaactaaactgaaatgtaaagcagaccattaacaaagggaggttgtcaaaagcccttaaaagaataaaaggaacattagaaaataaacatcttttaaaaatcaggtaaaattttaatatcccagaagattaataaaagtaattaaaaaaacaattttccttatagagtattaacttttgtagttctaaatacatcagaatgatcaaaaccaacaaatgaaatcaccagaattctttgtataatttcttgtggacaaacacaacaccaaggataagaaaggagaatttcgggccaggtgcagtggctcacacctgtaatcccagcactttgggaggccgaagtggtcaggtcacttgagggcaggagttcgagaccagcctggccaacatggcaaaaccccgtctctactaaaaatacaaaaattagccgggtctggtggcaggcacctgtaatcccagttacttgggaggctgaggcaggagaattgcttgaacccaggaagtggaggttgtagtgagctgagatcgcatcactgcactccagcctgggtgacagagtgagactctgtcttgaacaaaaaaaaggagaatttcagaattgtattatattggaaaaacttcagatatgtagtgtttctccccttgttcacagggaatatgtttcaagaccctcagtggatgtttgaaaatttggatagtactaaactctatgtatactatgttttttggatctgataactgagatgataactgagatactgactaatgggcagggagtgtctacagtgtgtatacacttggcaaagggatgattcacatccaggtgggatgatgtgagatttcaccatgctactcagacctgtgtgcaatttaaaacttatgaattatttctggaattatccatttaatattttcagatcaatgttgaccaggggtaactgaaacatgggaagtgaaaccgtggataagggggactgttgtactgtgtacctgggtttagatatagttgctagtaccaaaagtttttatccccactactattaccttcttctagctaccattatttttctttggaatgactgtaacgtcttcctgacagatctcccagcttcaagctgttcttcacaaactaatctgagtatgtctttgaaattataatttgttgtattagtttcctgtggcagttctaatacaaatcacaccctgggtggcttcagacaacagaaatttattctcttacagttttggagttcagaggttcaaaattaaggtgtaggcagagctgcattctctccagaggttctaggggattatccgttccttgcctctttcagcttttggtggccattaacattccttggcttgtggctgcttctctctctataccatcttcacataaccttttcctgtgtgtattgaattccctctgcctctcttattagtgtgggtatttagggtccatctggataatccatgattatcccttcatctcaagagctttaacttaatcacatctgcaaacacccattttgcaaataaggtaatattcacagacaggttctggagatttgatttggatatccaggggtgggggtggggggtcatttctcagcctaccacaccttccttcacactgttcttcacaaacgaacccaagtttgaaataacttgttcatgtcactcctttttgcatcttcaacagagctgtttatggttaggcccctgcttacttctctagcctcattgcttgctgtgctacacccacactccatctttcaaccattctaaatgaactgtatatttacagtttgtgttagtccctgtttcctctcttgcttcttgacctttctttgtacattctgtcctctttggcaggaatagtcaaatttcctttgcttacctaacagctctttcagattttagcacgggcatccagcaattccattaagtttccaaaatctgtatcagttatactttccctattacaatatctcttattaattgtgttgtaattgcctggtttctagtcctaatttcatagtccctggttgacttcataagactgtgagggcaacgtctctctctttctgttatgtcatatccccataatctagcacagtccctggcacagagtaaatatttgttgaacaaataaataatagaagggaaaaggatggattagggttaaaattgctaaaatttagagaattaaagttggtttatgtttttgaatatatatagaggttgaaaaaaaayttaatcattttcttgtttaggcttatgggataaaagcacaaaggtctgctgatttctcaccagcattcttatctactaccctttctgctttggacgaagccctgcatggtggtgtggcttgtggatccctcacagaggtaaaggaaaaatttttcgtaccttcttccattgacctataaccttcagagctagggaaaaagtttagttaaaaaacataaattatttctggaacggtaatctgaattaaattataagtacttcaaggatatggttctccactcagtacttagtgtggttgttctgcaaacagaggtgttaaaaacaaaatccttgctgactgattaaaatctacttaggttgctgtttcattgagttaacttagaaagtgataaatattgctgggtgtgtttatatatgtgttatatatataatgcatacatatatgttatatatacatacatgcatacatacatttatatgtacacacgtcacatatatgtaatatatacacatatgtcatatatgtaatatgtatgcacataaataacattatatattttatatatatgattatatcatgcctgtaatcccagcactttgagcaacaaggcaagaccctgtctttaccaaaaaaaaaataaaaaaaacccagaaaccatttagccatatgtggtggtgcatgcttatggtcctagctactcaggaggctgaccttgagccagggaggtcaaggctagagtgagccatggtcacaccactgcattccagcctgggtgacagagcaagaccctgtctcaaaaaaaagaaagtggtaaatattatgaaataatattatgaaacaattgggggaattaaaaaaggatcactccttataaattaggaaggacaatttgaaattttattaacatatggaaaaattatagtattaaactaaagtgagctgtttttactttctgttatagataaaatttcttttaggaagtgataggttattggattagttaatactgttggataacaaattatcccaaaactaagtggcttaaaacaataaactttggttatttcttagtttctttgtgagtggcttagctcagcattgttggtgagggatgcagtcatctgaagcttggtaggggctgtaggatctgtttctgaggggcccacttacatgactggcaaatgggtgctggtggttggcaggaggccacagtgcctcaccaggtaggctctccacaggcttcttgagtcttatgacatgatggctgacttcccccaggtgagtggtcttgaagaaggcaagatggaagtggtgatatctttggcaacctagctttggaagttacacaccactacttctgccacttttcgtcattagaagtgagtcattaagtcaagcctacatttaaggaaagggaaattagcctcttttttttttttttttgagacagagtcttgctctgttgcccaggctgaagtgcagtggcacaatcttggcttactgcaacctctgcctcccaggttcaagtgagtagctgggattgcaggcatgyatcaccatgcctggctaattttttgtatttttactagagatggggtttcaccatkttgtccaggctggtctcaaactcctggcctcaggtgatccacccacctgggcctcccaaagtgctgggattacaggtgtgagccactacacctggccaaccttttggaggaagaagtgtcaggaatttgaggacattttaaaaccactgcagttattttccttgaaaactgcttacaatgtggtgacttsatagacaatgtttatcaatacactcctgaggacttcttgcttgaaagttctaggggcataaatactttcaggaaacttctaaacaagaacagattattttcttacattctgatagtcataatttaactgtggattttttttccttggagatagggaccctgttttagatactatattttatttcctgtcttccaagagagatttaaagatttatatgagcaacacctagcagatgcctattaaatagttggtaaataaatgcgtgaattagttattaataaaaatgcacacacacacatacacacacacacacgcacacacacacacatcctcttcttttggaatatactrccaccaggtggtgccagaatcacatgattttacataaactttttgggctgaagttccacttgcttaaacaaggtttattacagtgtgatccacagtcrtaaacttacttatttaaatagcaaaaacattgaacttaaggaagattaactgggaaattctttttmctttttaagttttagaataatttttaatactttttcacttagcttttattaattattttttaaaatccaaacagaagttacaagccttttaggtgttttgttgttatctaattggctgacttggaataggaatataaatactttgactccttagtaggggcaaattctctcctttctgttctagctacaggtagcttcttcaatcttttttgttttttgtttttcaactgagtacagggagtatatcaaattatcctcaaacagagttttttttgcttttattacaatttttaattgatacaataattgtatatatttatggggtacagtgtgatattctgatatgtgtgtgcaatgtataatgatcaaatcaggtaattggcatatccatcacttcaagcatttatcattttttgtgtgtgttcggaacatccaaaagcccctcttctagctatttgaaaatatataataaattgttgtaaattatagtttacctaaggtgctatagaaaactaagacttattcctcctgtcttgctataattttgtaactgctaaccaacctttggctgtctccctctaaccatctcagcctctaataaccactattctactctccacttctatgagatcaatttttttagcttctacatgtgagtgagaacatgcaaggtttgtctttctgtgtctgacattttactcaacataatgaccttgagttccatccatgttgttagagatgacagaatctcattcttttttatggctgaaatagtactccattgcatgtatgtaccacatatttatccatttgtctgctgatggacacttaggttgattccatctcttgggtactgtgaatagtgctgcaataaaaatgggagcgtagattgacatactgatttcatactgtgtatcatacatgcgcatgcacatacacacatgtggaggtaagagagagctagcaaaacgataaagtaaattgggcaaaatgttaacggtgggtggatgtgggaaaagaatgcatatatatattctgtattgtttttatttatttttaatttatttttattttaaattaaaaaaaaagatacatggtctagctgtgtcacctaggctggagtgcagtggcacaaccatagctcactgcagcttcaaactcctgggctgaaatgatcctccttcctcagcctcccaagtagctaggactacaggtgtgcaccaccatgcctggctaattttttaaaatgttttgtagagatgagggcttgctatgttgcccagactggtcttgaactcctgacctcaagtgatcctttctgccctggcctcccaacgtgttgggattacaggtgtgagctactgcgcctggccttctgtttttattaataccattttcctgtaagtttaaaattatttctagataaaaaagtaaaaaaaaaaaaacctgtgatgtttgctgtaagtagatatccttgatcagaaataaagaactttcctccatttcctagctaaaatactaatttggtgttacattttatcaaaaacttttttttctgcattgattgaaatgattgtattatttttcatctttggtctaatagcatggtgagaaacatttaatagatttttctgatgttaaactactattgcatttttgggacaagttcaacttggtcatgatatattatctttttttataaactgttggattcagtttgctaatatttaagatttttcaatatttaggatggatattcagctgtaattttccttttagtagtgtctttgtctgaattagtatttatcttatactagtttggtagaatggattatggaatatctctttttttaatattctgcaatagtttgcmtatgatgggaattatttgttccttgaagatttggtagaacttgtctgaaaaattgtctgatcttgatatttttccttctgagaagattttttaaaaattcaattcctttaatgattataggactactcagattttctatttcttcttgattagttacagtgaatgagatttttaggaatttgtccattttctttatgttttcaaatttattataataaagttattcattacaatcttccagctcttaaatctggttttacatgtggtttttgtccccctttccatttctgatattacttactttgttttatttctccctctcttttaaaaaaaatcttgtcagaagtttgagtatgtatgtcatcattttaaagaactctgcattttgttgttctttgttggtcttctctattatttcttcatcttctacctcctttatttctgccattttcttattatctccttttatttaatttttttgtggggttattctttgcttctaacttcttaaattagatatttaatctattaattttcagtttttctttttactctgaccttttaagaytgaatttttcttgaagcattctattttgagatatagtatttccattttcattctgttctagaagtatttaaacattcccatcacaattgcttctttgactcatgtatcatttggaattttaaaatatctaaattacttaattaaaaaaatttattttaattacattattaatctaattgcatttttgtcagataactttgcatgatattgattttttgaagttccctgagacatcttttaaggttaaatatgtgatgaactttgataaatgttgcacgtgtgcttgaaaagaatgattattctctaataattgggtgccctattttattttaggttcagggggtatatgtacaggtttgttacattggtatattgcgtgatgctgaggtttggggtacgatttataccatctctcagctactgaacatagtccccaataagtagtttttttagcctttttccctgctcccttcttcctccttctaataatctccagtgttgattgttcccatctttgtgtccatgtatacccartgtttagctcccacttataagtgagaacatgcagtctttggttttctgttcctgtgttaattcacttaggataatgaccaagagctgcatccatgttgctgcaaaggacatgattttgttctttttatggctgtgtagtagtccatggtatatatttaccacattttctttatctactctaccatggatgggcacttaggttgattccatgtctttgctattgtggatactgtggcagtgaacatacgagtgcatatgtctttttggtagagtgatttattttcctttgggtatatatccagcaatgagattgctggstcaaatggtagctctgttttaagttctttgggagatctccaaactcctttgcacagtgattgaactaatttatatttccacctacagtgtataagcattccattttctctgcaccctttccagcatctattattttttgactttttttttttttttgggacagagtctcattctgttgcccagcccggagggcagtggcacttttggctcactgcaacctctgcctcccaggttcaagtgattctcgtgcctcagcctcctgagtagctgggattacaggtgtgtgctaccatgcccagctaattttattttttagtagagatggggtttcaccatgttggccaggctggtctcaaactcctggcctcaagtgatcygcccacctcagcctcccaaattgctgagattataggcatgagccactgtgcctggccattttgacttcttaataatagccattctggctggtgtgagatggtatctcattgtggttttgatttgcatttctctaatgattagggatgttgagcattttatatttgatggccacrtgtatgtcttcttttgagaagtgtctgttcatgtcctttacccacttttaatggggtcattttttgcttgttgatttgtttaagttccttatagaatctggatattagacctttgtcacatgcctagtttgtgaatattttctcctattctgtagggcgtccatttattctgttgatagtttcttttgctgtgcagaagctctttagttaggtaccacttgtcaatttttgtttttgttacaatatttttgaggtcttagccattagttctttgccaaggctgatgtccagaatggattttccttggttttcttctaggatttttatgggttgggtcttagatttaaattgttgatccatcttgagttaatttttgtaaatggtaaaaggtaggggtccagtttaattattctgcatatggctagctggtaatctcagcagcatttattgaataggaagtcctttccccatttttttattttcgttgactttgtcaaagatcagaggttgtaagtgtgtggtttcatttctgggttctctattctgttccattgatcactrtgtctgtttttgtaccagtaccatgccgttttggttgctatagtttgaagtcaggtagtgtgatgcctctagctttgttctctttgcttaggattcccttggcttttcagactcttaacttcccatatgaatgttagaatagttttttctaattctgtgaaaaatgacattggtaatttgaatctgtacattgctttgggaaatatgccattttaacggtattgattcttcaaatccatgagtatggaatgttttttcatttgtttgtatcatctatgatttcttgtagcagtgttttgtagttctccttccaaagatcgttcacctccttggttagatgtattcctagatattttattttttttgtgtagctattgtaaatgggattgtattcttgacttggctctcagctggaatgttattggtgtatagaaaagctactgatttttgtgcattgattttgtagccttcaactttactaaagtcatttatcagttctgggagccttttggagcagcagtctttagggttttctaggtatagaatcatattgtcagtgaagagagatgattttgctttttcttttctattttgatgccttttatttctttccctttttgagatggagtctcactctgtcgcctaggctggagtgcagtggcacaatcttggttcactgcaacctcacctcctcaccttctcttgcctcagcctttcaagtagctgggactataggcgtgcactaccactcccagctaatttttatatttttagtagagatggggtttcaccatattggccaagctggtcttgaactcctgacctcaagtgatctgcctgtctaggcctcccaaaattctgggattacaggcatgtgccaccgtgcccagccttatttctttctcttgcctgattgctctggctaggacttcctgtactatgttgaataggagtggtgagactgggcatccttatcttgttctagttctcccaaattttgcctgtttagaatgatgttggctgtgggtttgtcataaatgggtcttagtattttgaggtatgttcatttcgatgcctagtctgttgagggtttttatcatgaaggggtgttggattatgttgacagctttttctgtgtctatggagatgatcatatggtttttactttaaatctgtttatgttgtgaataacatttattgatttacatatgttgaactagccctgcgtctcaggaataaagcttacttaatcatgatgtattaactttttgatgtgttgctggattcagtttgctcatattttcttgcagatttttgcatccatgttcatcagggatattgacctgatgctttctttttttttttctttttttaaaattttattattattatactttaagttttagggtacatgtgcacaacatgcaggtttgttacatatgtatacatgtgccatgttggtgtgctgcacchactggtcattttgcattaggtatatctcctaatgctgtccctccccccctcccccacaatgctgtcttttacattgtgtctctgccagattttggtgtcaggctgatactggtcttatagaatgagttattgaggagtccctcttcctcagttttttggaacattgtcagtaggaatggtataagtgcttctttgtacatctggtagaattaggccgtgaacatgtctggtcctgggatttttctgcttggtaggctttttgttacttaattcaatttcggacctcattattggtctgttcattagtttaatttctttctggttcaattttgggaggttgcatgtttccaggaatttatgcatttcttctaggttttctagttagtgtacatagaggcgtttgtagtagttctctgagggttttttgtatttctgtggggtcgatggaatatcacctttgtcatttctgattgtttatttggatcttttttttttcttattagtctagctagcagtttatcttatatattctttcaaggaacaaactccttgattctttgatctttttaattatttttttttttgcatctcaattttgttcagttcagctctgattttggttatttcttatcttctgctagctttggggttggtttgctcttgcttctctgtttcctctaggttagatgttaggttatttacttgagaacttctgaactttctgatatgggcttttaacagtataaactttcctcttaacactgttgtagctgtgtcccagagattctggtatgttgtatctttattctcattagtttcaaagaatttcttgatttctgccttaatttcattgtttacccaaaagtcactcaggagcaggttgtttatttccatgtaattgtatggttttaagtgattttcttagtattgatttctatttttattgtgttatggtccaagagtgtgattggtatgattgcagtttttttttttaatttgttgactattgttttatggttgattgtgtggtcagtgttagaacatgtaccctgtacagatgaaaataatgtatattctgctgtttttgggtggggagttctgtagatgtctattaggttcatttggtcaagtgttgagttcaggtcttgaatttattagttttctgtcttaatgatctgtcttataatgtcagtggggtgttgaagtctcacactattattatgcagtctcttcataagtctttaagaacttgctttatgaacctgggtgctcctatgtttgctgcatatataggataattaggtctttttgttgaattgaatgctttaccattatgtagtgcccttgtcttttatatatatattatatatatatattttttttattatagtttaagttctagggtacatgtgcacagcgtgcaggtttgttacatatgtatacatgtgccatgttggtgtgctgcacccattaactcgtcatttacattaggtatatctactaatgctatccttccccgctccccccaccccacaacaggccccagtgtgtgatgttccccttcaaaaatgatgagttcatgtcctttgtagggacgtggatgaagctggaaaccatttttgtctttttttatctttagtggtttaaagtcggctttgtctgttataatagcaacccctacttttttctattttctgtttgcttggtagatttttctctatccctttattttgagcttatgggtgtcattgcatgtgaggtgggtctcttgaagatggcacaccattgggtcttgactctttgtccaacttgccactctgtgccttataattggggcatttagcttgtttacattcaacgttaatattgacatgtggatttgatattgtcatcatgttgttagccrgttattatgcagacttgtttgtgttgttgctttatagtggcaatggtctatgtacttaagtgtgtttttgtagtggctggtgatggtctttcctttttatatttaacactcccttcaggacctctcgtaaggcaggtctaatggtaacaaattcccttagcatttgtttgtctgaaaaggatcttatttctcctttgcttagtttggctgcatatgaaattcttggttggggctgggtgtggtggctcacgcctgtaatcctagcactttgggaggctgaggcaggtggattgcttgagcccaggagtttgagaccagccggggcaatatgatgaaaccctgtctctacaaaaaatgctaaaattagccgggtgtggtggcatgtgcctgtagtcccagctactcaggaggctgaggtgggaggactgcttgggcccaggaggtcattgctgcagtgagccatgatcatgccactgcactccagcctgggtgacagagtgaaaccctgtcacatatacacacacacaaaaaaacacacacacgaaattcatgattggaatttctttaccttaagaatgttgaatatagtcctccaatctcttccagcttgcagagtttctgctgaaaggttcactgttcgcctgatggagtttcttttgtaggtgacttgccccttccctctagctgcctttaacatttttttccttcattttgactttgatgaatctgatgactgtgtcctggggatgatcattttggatagtatctcacagaagttctctgcatttcttgaatttgaattcaggcccccagctttgttctctgggcccttcaggttaggaaccttctgtgctggaggagcccaggtgttcttggatctctggccacaacactgatgtgtggtgccagccaaattgcgttgttggggtggtggcagtgggatctgtgcttgttcacatgtaccaacagcagctgcgttatggtgggatgcacactccatggcttggatggggtgctggtgggtgcggcgctgccagcctctgtgtgcatattcatactggtggtggtgttggcgcatggggtagtgcggtgctggcaggtacagggctgccagtctccatgtgtgtgttcgtgctggtggcagtgtggggggtggcgtgtgggttgctgtcctccgtatgcgcgtttgcagtggcaatggccacgcagtggtggggttacactctacaccacagctgtggcatagtgggatgcatatgcacatgggtgccagcgatggaggggaggtgaggtctacccacacgtgtgccagcaaaacggtagggcaggtgggggcrtggccgagtgcatgttcctgctggcaaagcagcacagaggaggctgcagtcagtggtggtctggtgtgcctcagtggaggctgctctactggagctcttgatggtcagcattatctgccagtgaaggagctatgatgtaggccccctggaggcacctcagttgggcatccgagggtacactgcaagtgtgctccaccaggttgggaccctgggagaggccagcagacaaggggtgctttgattggactggctccatttcacatgcaagaccaccatgatctgttcagatttgacagttctcctaaggctaaagtctcctaggagagcatggtgagccttgggagatggacaaccctggttgtgctccactgcagacattactgcaccaaaccctctgggttccacactgcattcctacccctaccacctctctaagcacctctcccagccagctcaggtgtccacaccctggggtcgtggggtctcctgctgctaggatttcagaggtctgtggtgagaggggtttgtttttcacctcttcaactcaccccttcctcaggagtccttgagggccagaagtaagtcttggtgtgtgatagcccaatgcagggttcccagtttcttctttcttcagcccagcatctatatcctccctccatccattctcattgccttccctccaaagatctcagaatgtgccagtcttcccaaagtcccagtcacttggtggcatgtgttcctcctggctgcgtctagttggccatcttgccccagggtcttctctctaattttaggcatttattttcttctgctagttttggggttggtttgttcttttttttttttttttttttttctaattccattaggtgcaaagttaaattgttaatttgaaatctttctaacctcttgatgaagaaatttagtgttataaactttcctcttaatactgctttagctgcctcccagagattttgggaagttgtgttcctattttcattaatatcaaataattttttgacttccgccttaatttcttgttcacccaggagttattcaggagcaagttgtgtcctttctatatttgcgtagttttgagagatcttcttgatattcattttaatttttttggcactgtggtctgatagtgtgcttgatgtgatttcgatttttaaaaaaatttattgacacttactttatgaccaaacatgtggttgctcttagagtatgtttcttgtacagttgagaagaatgtatattctgtggttggtgtgtggatcgttctatagatatctgttaggtttaattggtcaagtgtcaagtttaagtccagagtttctttgttatttttctgccttgatgatctttctgtcactgtcagtggggtgttgaagcccccccccatttttgtgtggttgtctaagtctttttatcagtcaagaagaacttgttttatgaatctgggtgctccaatgtttgatgggtatatatttaggatagttaaatcttcctgttggattgtacacttttttgttgttgttgttaagatggagtctcagtctgtcaccaggctggagtgcagtggcacgatctctgctcactccaaactccgactccttggttcaagtgattcttctgcctcagcctcccgagtagctgggattacaggcacgtgccaccacaacccaactaatttttgtatttttagtagagatggggtttcaccatgtcggccaggatggtctcaatctcctgacctcatgatctccctgctttggcctcccaaagtgctgggattacaggcgtgagccaccacgcctggctggattgtaccctttatcactgtgtaatacccttctacgtctttcttagtcgttatggtttaaagtctgttttatctggtataagaatagtgacttctgcttgttttccatttgcctgctagctctttcttcatccctttttactttgagcctgtgggattacatgtgagatgggtctcttgaagacagcagatggttgagtcttgtctttttttttctagcttaccattctgtgtcttttaagtggggtgtttagaacacttaacattgaagtttagtaatgacatatgagactttgatcctgtcattgtgttgttggctggttgttatgtagacttgattgcgtagttactttatagtgtctgtgggctatgtacttaagtgtgtttttgtggtagcaggtgtcgttcttaccattccatgtttagcatttcctgaaggacctcttataaggctgttctagttgaaacaaattccctcagtgttttcttgtctgagaagacgagataaatttatttatttttcacttatgaagcttagtttgtgggatatgaaattatttgttggtatttcttttctacactgaaaataggtccccactctcttctggcttgcagtttctgctgagatgtctggtgctagcctgatggggttccttctgtccatgcattaccattctctcttgcttccttcaagacttttttcttttgcattgacctcgttgaatgtctgtgtgcctttgggatggccattatgttgtctggatttcttgtacctggatatctacatctctagcaatattagggaaattttcttgaattattccatcaagtatgttttccagrttgtcaactttttctcctctctcaggaatgccagtaattcataggtttggttgctttacgtaatcccacacttctcaaagactttgttcattttataaaattctttattctttctttctttttttttctttttcctttgagatggagttttgctcttgttgccccagctggagtgcaatggcgcaaactcgactcactgcaaccttcacctcccgggttcaagcaattctcctgcctcagcctcccaagtagctgggattacaggcatgcgccaccacacccagctaattttatattattttagtagagatgggttttcaccatgttggtcaggctgatctcaaactcctgatctcaggtgatcctcccacctcagcctcccaaagcactgggattacaggcgtgagccactgcacctggcctaaaattgttttttcttgacttttgtctatatgtgttagtttgaaatatcagttgtaattatttttttctgcttggtctagtctgttgataaaattttcaacagcttggcaatcataaagtgaagttttcagttccagaagctctaattgattcctttttaagatgtttatctcctttttcatttcctggattgttttattagattctttgtgttgattttcagtcttttcttttatatctttgagtttcttccaatccatgctttgaattatttatctgacatttctgagtttccattttggttggggacctttcctagagagctactgtgattctttggtggtgttacaaaaattggatttttctggtgccagcattcttatgttgcttccttctcatttgtaggtgttggcacttctaaatttttgttttttgagacaggttctcactcttttgcacaggctgaagtacagtgaatcatgtcccactgtagcctcgacctcccaggctgaagcaatcctcccacctcagccttccaagtagctgggactataggcgtgtgccatcatgcctggctaattttttaattatttgtatagacagtgtcccaccgtsgtcttgaactcctgggctcaagcaatcctcctgctttggcctccagggttggagtgctgggatggattacagacatgagtcaccgtgcctggctggcacttcaaatttttgtagatattttcatgcaggtagggttttctttccctttcttttcttgtattattattgttttttccccctttccttcccccactcactaaagggtgtgacttaagagtatgtcgagtagggtcttttgtctttgtttccatggccttctgttctggcagcaggttgtatattgggctgtggagttcaacctacgggccagtagatgatgcttacgggtgagagtcagctgtggtggaagcagacagttatgtacttggtatttgtttactgtgaagaactctctgttgttccaggtgataggctagactgtggagggctgcataccatgtacttcctattttacgggagtgctggggacatagctgggtagagtggataacctggcttgtccacaaatacccctatgtcaaatgtagaagtgtagtccccaaccctgatgagggtggctaggaaaagctcccagtgaattgtgccacagtctctgtgggggtttggggtgctacacaagccccttctagatagactggaatgtagattgttgcccagtcacacccttgttctagagctcttgactcctggatcagacacacactgcagcctatctccagaccaccatgtggttgagagccttaggaaatgtctaatttttgactctccaggggagtggtttttggggcagaacttcatcacttagcttaatataggtagctgtgtggctcctctgctctccaatgtgatgactcttcttcatttaagagcggggttgggggactccttctttgggcctctgcaggggtgtgttggttttggtggtgttggctggttgcgtcggttcaacctcaggcaatgggagatgtggtaaagtactagcaaaattggaatagggtagggagatctgtaagtccctagttagtccctagatggctggctggacttcctctatgagtcttgatggggctggattgttggggagcctcaggtcctggctgtgatgggaaggggtgagggctgatatctgggtgaggggctaaactctcaggcagggcacttaggcggtgggagccctagggaagatcacaggtctatgggggtaaggttttcgacagggctttgggccatgactgaaatgctcatgtaggggtcggctatgtgcagtagaagccagaaggcagcagtcctggttggggagtgggcagtggaggaagggggtcatgtggaaagcattctggccacctctctgaagggtagctgctggcactggagtttctctccccagcctgggggcagcaggggtggccacggcagaggacctgttcagttgcctttgggagtgatggtgatggggggtgtacctgggaagagggaatggggagcaggttgggtactcctctctgctgatggaggtgcttgaaagcacctttgttccctccctagcctagaagtagcaaggatgggtactgcagcagctgcagtggcagagggcctgtcagttgcctttggaagctccaccctagagaaacagagctgctactcactgaagtgattatgtgggggtaggggtgcctgwgctggcggcccaagtcaggaggccctgccctgtaaggagcagcaggggctgggcctctgagagcaaagagtctggccacctttcctgaaggcagctgcatcctgctggaggtctacttactctcaaggcagctgcatcctgctggaggtctacttactctcaggctcttcactccctccccagcctgagagcagcaggagcaaggacctgacagaggcagttgcagtgggcctgtcagttacctccgggagctctgacccagtgaaatacagagccagagccgtgaccgactgaccagagtgctcagttggtggtggagtgggcgtgctgggggcccaggccagtggccttgcctggcaaggaacagcagaggcagggcctgcagtctgactgctcctaaactccatggatatggcttctatcctagagctacgcgaaaaaacctggcctcccttggtgggactataacagctggcaccagggaactcggggatccaaggttggtggggatccccgactccatgtggggttgagcttccaagaagtcttccttacatggcttatatggctgggaagttggtcctggctgttggcagttctttgcgatgtgaacctttccataggactgcttgagtgtcttcatgacacaacagctgactttctgcagagtatgtgatccaagagtacagggtagaaatgacaatttctttttaagacaaagccttggaagttacataccatcatttctgcagtattctattagtcacagacaaacctgatacaatgtgggaggagactacagaaaggcatggataacaaaggtgagcatcattgagtcttagaggccgcctaccactgatatatgcatgtgtgtaaacatatgtacgcatgcatgtgtgtatgtgtataattaaaaaaaaaactttatgaccattctgttctcagaaatgttgtagtaggcagaatttcttaaatggcctctcaaagatgttctgccctaatccctggaacctttgaatatgatgagatgtcactcccatgattattatatgttatatggtatagttgactttaagatggggagattatttggatctaatcatatgagcccttagaagtagtgagctttctctggctgttaaaaaggggaaggaagaaaagcttaaaacccaagaaggactcaggatgccattgctgccttgaaggtggaggggccatgattaaaggaatgtaggcagcctctagaagcagtgagtggccctgagataagagcaagaaaggaacctcagacctagagctgcagagaaatagatttttgccaacagcttgaatgaacttggaagttgattcttactcccaacctccagataagagtccagctcagctgagatcttgatttcaaccttgtaagaccttaagcagagaacctagccaaccctatctggacttctgacctgattgtctctgatttatcctctgctgcttctgctttaggaatgaatagcacttctctacttccacttttcatcttggtgttgtaactgaatatataagtatacccagattcagtgacattcacataagtcaaaactgacttgcagtgacataataaatggatgctgttcaagctgccaagtttgtggtaatttgttatgaagcagtagagaactaataaaatacaggtgtcagtgaaggtgcctaattaactgcattgcacagtctttgtttctggttaaaaggtcaagcctagtgtcctagatagatgtcagatagatctggtgggtgggtggggtaaggcaactgattgaatgaacttagagtggatctggagattgagagagtaagaatcaatctggaaatattttgctgtcatttttatagtttctctttcctgactttaacttaaaaatttcctaggttatttatcatcagttttgacttacgtgaatgtcactgaatctgtgtatgcttacatattcagttacaacaccaacatgaaaagtggaagtagagaagtgctattcattcttaaagcagaagcagcagaggagaaatcagagacaccaactctgcggacctgctgaaggaagtgaactacagggcattgttccattccctgagaacagcaaacaccttaaagtttgtattatgtggagatcaaatcagttyggtagccttctcatatgagataatatagatcagtgttcctcattcattttttcattattgtctcctaagaagcctttttaacaattttttcttaaccacaccctccaatgaagtttttctaccacacatatactgtatatctgtttttgtactgtataaatatctgtgctttatacataaaagagtaaaatcttccccttcctccaaaacaacttttacccttggggttaatattacccatgctgagaatgcataagatagatgctattgtgaataggtaaaattaaagttatatttaaagatacaggtgaggtgcagtggctcacgcctgtaatcccagcactttgggaggccgagatgggcagatcacttgaggccaggagtttgagaccagcctgcccaacatggtaaaaccccatctttaccaaaaatacaaaaattagctgggtgtggtggcatgcgcctgttgtgccagctacttgggaggctgaggcatgagaatcatttgaatccaggaggcagaagttgcagtgagctgagattgcactactgcactccagcctgggcaacagagtaaggctccgtctcaaaaaaaaaaaaaagtattcagagatatcatcaaaaaaggtattttcagctaggtgtggtggctcatgcctgtaatcccagcactttgggaggctgaagcagaaggatcgcttgaggccaggagtttgagaccagcctgagtaacatagcaagaccctagctctacaaaaagtaaaaaaaaaaaaaattaggtgtggtggtgcatgcctatagtcccagctacttaggagactgaggcaggaggatcacttgagccaggagttcaaacctgcagtgggctatgcttgtgccactgcacttcagcctggggtgagatcctgtatcttaaaaaactattattttcatactgtaatataatctagagtacaggaccagagaactcagttcaacacagagagatgtaatatctgcatagttattatgcctggcaaagtttttgtatttttagtagagatggggtttcaccatgttagccaggatggtctcgatctcctgacctcatgatccacctgccttggcctcccaaagtgctgggattacaggcatgaaccaccgcgcctggccagcatcttagttttttcttggaacaattactattatagttcttttttttttgagacagagtcttgctctgttgcacaggctggagtgcagtggtgcgatctcggctcaatgtaagctccgcctcccgggttcatgccattctcctgcctcagcctccccagcagctgggattacaggtgcccgccaccacgcttggctaatttttttttttttgtatttttagtagagacggggtttcactgtgttagtagccaggatggtctggatctcctgacctcgtgattcgcccaccttggcctcccaaagtgctgggattataggcttgagccaccgcacccggcctattatagttctttttataattggcaggattagctgtggcctacatgatcacaggaaataataaggcaggggttgtaaactcaaatgcctataagcacgagccatgtaacagaagtwcatgaaacagttaagtgtaagacatagatatttattagttgattttagctgctgacaacagcagcaaacatttatttttttgctcatgggtctccatgtctgcaaaggtggatcctgtcttcttcaggctgcagtgaggttcagatgtgccccacaagttgtaacagcagcaggaaaaccagagagagatttcaaatggatgttccttgagtacagtctgctgacattcatttatcctgccctatgttttgaaaggcagataactaggcctctgttctaatacagacatttagcatatgcggttgattggaccattgttcccaattcttcacttactctctaatttaraaataaacattctgctctgtaatggtttactagagtcttttatgtggcacatgttcaataactgctgttaaatgaatgattatatcccttaatactgtttgatttttgttaatggtggaacttggggtacttgtcatttccattccctcctgctttttctgctcttttcccatccctactcttcctctctcccttcccatttacttccaaaacggcagctgtcaatatgaaaaaggagggagtggtagagagaatccaagacataaactcttccacatgttggtgtaaagtaatttaagatcaaggtttctttcacaaggcaaaatgcaatgcaacctggcctttctgagattctttttttttttccttttttatggttttggctttaggatttagaatgttagttattttaaaaatgaattttgtaggtctgaagacctactcatatttctacataattgttgagcaaacggagacaagtagttagatgctggaggtcattaaaaaatattttttaatgaagcttttttaaaacatgctcactggtttcagatcagagccaggcatccttaaattgtcttctgccaggtattggcttggcagattaccctgtccagttgccctcatcttgaatgtgaggagagttaacttgataagattttaggtcctaactggaccagattttacattcctctcagccatgaaaagtttaagatgagcaggcttcatttttactttagtacaattagaccttttcttgggaacaattctctttcctcttcaaaccaattattaacattttcttccttgctgatatttgagtgatattcactactgactttttttttttttagttcttttacatttctcaagcaggttgttgaaactttggctctaactatatgaagtgaattgtttttttactggtgttttcgctgtgtaaatattgtattcagtctgagtttacaagaagcaaataacttagcctattctggtttggcatgttttctctttctaaccaccattggggctgaagctgggaactgaacacaacttgaaattttgtggtttgggtgctagaattcagagctagactatctgaagctaaaaattattaatgttgaaatgttttcacccactaaataaacctgaaaaaaaatgaaatgtaactccaggcagcccataaaatcgcatatggtataatttttttgagtctaggaagagatgaaaaaaatttgtgagcaggatctgagattgttaaaaaaaattagaaattgtttattatggtttaaagtaaatgctactatccaaactctaatccaaactcaacaaacaaacccagaaatctcttactgttattcacatgatgttttattttctccaagactatactgaatcagtacataaaaataatgaagtagggaaaatgccagttgcccttgtttaacttttcagctattttttacatgttttctttaaagatagaatagtaaagtaatactttacattttcaaggtacttgatacttcactgaatatttccaaatatatcatcttaattaaaataatggcttgtttcacccttttaaaaatcacaaagcattgaacagttttcagctcattaaatctgagaacatatccaaaacttggcacatggatagtatgtatagaaaggctagtcctttttcctctgctagttagcactctaatgatattaatgatggaagatttttctcagcccctttgctggacttatgacaggggtatcccatttactcggcccaccatgctcaacctcttgcgggagggagcacgtgagtgagtgagtgcgggatctggctggctgttccaggcacttgcaggagcaagcttcatgtgctggtatgagtgagcaagtgcgggatctggccagcacagctcggagtgccagcaggagcaagctctgtgtgggatccgcggccagaccaggcatgagctagcgagtgtgggatccggccagccactctgggagctgccaggagcaaactccatgaagggcccgtggaggcacccaggtaagggtgcctgtgaccccgaatccccagagtgggtgttacagtactctcttagttctgccctctgcggacggtggtgtgttagcagctcagttggccccttacctcgttatgtggggcagttgccctctgctggtgagggcaaagggccagcgtgacagccttctgggtacccgcacttggtgggtccctgtctggcatccaagaagaatgaggtcagttggacaattgacggatggtgaaggcagataattttattgagcgatgaaaatgactctccgtggagaggatagctagagaggggacaggaagggcaggtcatcttccctaaagttgggtcatctcttccccgaagtccagctgtcttacccaaagtctggccatctcccttaaattccggctgtctccggtattgattgagtttgggttctttataggtacagaatggggagtgcatgctgattggtttgcaattatgcaaaaaattttaaagcaaagacaccactcaaaggtgggcgagacagtgtggaaaacgaattaggaaagggtaggtatacgtaaaataggtgaagggtgaggatcagtccagaggaaagcgtgccaaacaggaagacaagttctcactctggtccagggatttaacatatagcttggctttcaggctttgaactgtatccggcttggaggtggggtttcaccggatacctggccctaccctatctgcctaggcatttcactgcctcctgtcgctatcattagtaagcataagcatttctttatttcaagatccactttcaacttttactgacagaagtttcccttgccctgatatctggtgactaatttgatccatgttgtttttgaaaatgaagaaagttccataaaaatgtttagagctctgaatttagactagcattctccaaagcagggtatgtaaaatgtttcattaggttgtgggaagaaaatattaaaacttttattgtttcaatctaacaaatgaaatttaccttaattaacatttaatcaatggatcaacactgacatcctcacttggtctgggtgtcagactgttgggtatcagttatagtgcatgaggaaagcatgcaggggttgacagaggccccttgcttgttattttcaacatactgggatgaattataagtctgcatatatctagttaggtggatttatggatttaacaaaatcaaagttcacaaaacagataaatggcaagaaagattcctgcaaagaaactaaattgtgtgcaatactaataatgagagtggaagtgagccacacacatgtataggtcagagcggatgcttctcctatgagacattaatgttgaagtaaaaatcaacaacaatctaatctcagctgagaagatgtccagaaaaagtgaaattataagcaagacaatttgatagatggaattgtatccactattgttaacaaagaaacactttctgatattttattcccttgaaatactggctaacaatagtaggaagccatcataattaatgaacatgtgggacaggaagttaaactgacaaaagtttttccatgacatttaaagttatgtgacacataactcagtatctagaaaaatgtcattaaaataaataatagatatttaaaagcatcttttgtgttttcttaacagcaaaagaccaaatacagtacattattagtaacattagggacacacttgttcataaaatggatgaaataaaacataggaaacaatatggcaacaagttaaatgaatttttttttttgagcgaagttttgctcttgttgcccaggctggagtgcaatgacgcgatctcggctcactgcaacctccacctcccaggttcgtgcgattctcctgtctcagcctcccgaggagctgggattacaggcatgcaccaccacgcctggctaattttttgtatttttagtagagacgaggtttctccatgttggtcagactggtctcgaacttccgacctcaggtgatctgcccacctcggcctcccaaagtgctgggattacaagcatgagtcaccgcacccggccttaaatgaactctttcatgaacaaatactttgagaagttgcatagaaatctttgaagatgatttgaatcattgagaacttaaattatttaatgtgagaggatgctatatatttgaagtacagatgtttctaacaaggctcagattatcatagtagctatattttgtttcaataatgaaatacatgaagaactaatttcattttgtgccattaaaataaagatgtatcagggaagatatattcttgaaaataagtgactttatgaatacaaaacaatgtatatgagagaatttcctgggataacgatagtgttttgactttgtaagagtttaggttgcatacatgtatgcacttgttcaagtttatgaaatggtagacttataatttgcacatttcattgcatgtagaatttactgcaaaaggaaaaaaaggaataatacatgttaaattctagttaatgctatgcatgctggactgttgggggaaactatattaatgtgtttracttactttgaaatgcattaaaaaaaccctaagatggattggtgaatggattaatcatacagaaagcatacagtatagtcatagtatagtataacaaatacagtavaaattktaaatgcagagtctaagtggtgggtatatggatggtccctgtaaaagtctttcaacttttctgttgcatcatccttaggtaatctatagcaacacataggttgatgtcagatatgcaaagagagtatttcagtatggtattaatgttgttaatttttcttaaaatctgactgttaggctgggcatgttggctcatgcctgtaatcctagtactttgggaggccaaggtgagaggattactttagctcaggagttcaagaccatcctgggcaacatagtgagaccttgccactacaaaaaataaaaaattacctgggtatggtgatgtgtgcctgtagttccagccgcttgagtggtggaggtgggaggattgcttgagccctgaaggcagaggctgcagtgagccgtgatcatggcactgcactccagcctgggtgacagagcgagaccctgtcacaaaccaaaacaaaaaaacaaaaaatcctaactgttgtatagaatccctagtgtactctataatgagatgagaagtgaccatgagaatcatttgaatcacaagagcatctctgattatcttacagcaaagactgtaaaagaatcattgaacttaaaagatgggttagctgggcatggtggctcatgcctgtaatctcagcactttgagaggctgaggtgggtggatggcttgagtcctggagttcaagaccagcctgggcaacatggtgaaacccagtctctatgaaaaaaaaagctgggcatgtgtgaatttgaggccacttgcagtaagttatgttcatgccactgcactccagcctgggcaacagagtgagaacctgtctttaaaaaaaaaaaaaaaaagatgggtgaagcatgtttttttaaatgaaaagacaagagatgtcaaatttgctgacccttttttgtatgacaagtgactatgtaatctgcattgcagattaaacaccaagcaaccaaccaatcaatgcaacactgttacttcatttcttcaaggtaaaggtaatgttttaacaaggagtgaaaatgtaactgccttttctaaaggctgggataaaaacacagaatgtttttaaaatcactgtttggaatatttcttttatcatgtgatttttgttgtcaaagatatgtgtgtcttatgaaaatttatctgcactcttaaaaaatacttggaaaaatattttgtatactcttcaaaaatgttacaaatagagtttcagtcagtgggggggaagggggaataggggaaggagagatgttggtaaaagggtctcaagtttgttagacagtaggaataaattttggtgatttattttacagcatggtaactatagttagtaataatgttgtatatttcaaattgctagaagagtagattttaaatgttcccaccaaaaaaaagataagtatatgaagtgatagatatgttaattagcttgatttaaccattctacagtgtactataaacatatttcaaaatatcatcatattgaactccataaatatatattattatttatcaattaaaaatattaaaacaagcaaaacccatgatacatatctggtggcaaatgagtatcgtggtagaaattcatcaaactgctcagatgtgatttgtgtacttttctggctgatggtcatacttcagtaaaactaaataaatgtaagcaaaaaaaaaaaaaagtttcagtgggtttttaaaccagttgttaaaaatgttaaaatgtgacatgttttgattcgtctgcaagaacaatcaattgacgtgaaggaagatcaataaaaacttttgcataattgatggaaggtattgaaaaatgcaagtagtaatttagttaagtccaacaaatgatgtatttctttaatttcaatccttgcatctttgtaattatccccttctcagcttacaattaagtactgaaataagtggaacttaggacctgacatttcaatcaccgaatcacaaaatatttacattattattttttaaagatacaatttggcttattattttcattattatcattgctctacttaaaatggtaagcttttatgagagcaaacagatcttttatataagtaataaatattataaaatgatttttaatgtttataatttttaattcatactttgtgtgtgttttatactctataggacatattagtaaaatagtatgttcataataaatatgcatatattggagggctgtactaaattttgttttgattgctttttttggctggtttgttggggtatgtggtcaaataagtttggagaactctctttactgatctctcataatctggcaagctattattgacaggagtaattatttattcttaaagtctaaatgatcattgtaaagattataaaccagcatatagttttaaatatgggaatttttttttttttttttttttttgagacatggtcttgytttgttgctctggctggtctagaactcctgggctcaagtgattctcttgcctcagcctctgggattacaggcgtgtgctaaacatttgtgttttaaggttgaactttgataaatgaagtttacctttagaccaaattctgaaacagtggttctcaaagtatataataacatcagcattacctgggaacttactagcgatgtaaattctcaggccatgacccagacctactgaaccagaaatgctggttaacaagctttccaggtgattctgatgctcactcaaatctgagaaccacatatctagatgatttagactcatgaatcactcctacttatttcttcctacttcataatgtatctgagacagtttctttattgtatgtcttagttttagcccagacttttttccctctcttagatttttttttcttttcccttcctctcctctccccttcctctcaatgttaaaaaaaaagttctttagtgttattttcacaaagaaatagtgcattggttctaaaaatttgggcgccacaactaatgtgacaaatagcatgtgtttaaaggagatatttctaaacattttcaaattaattttgttaactactgtattagttcattctcacattgctataaagaactacctgagactgggtaatttatgaagaagagaggtgtaatcgactcacagttctgcaggcttaacaggaggcatggttgggaggcctcaggaaacttacaggggaagcaagcacatcttattatggcagaacaggagagagagagagacagacagagacatcttactatggcggaacaggagagagagagacatcttactatggcagaacaggagagagagagagagagaaagagaaagtgccacacacatttaaaccatcagatcttgtgagaactcactatcatgagaacagcaagagggaaactgccaccatgatctaatcacctcccaccaggccccctcctccagtactggggattacaattcaacctgagatttggatggggacacagagccaaactacttctagttacacttgaatatggatataattaatttcctattatttcctgtctatactcttttgatttcaacttttataatctcaaaatagttttctgccaatgaagatttcaaaacagacatttcaaagtaggaatcacctaaactcaacagttgtttataaagcaataaatttgctttatttctctttctacacacatatatgcacacacatacacatttttatttgctgaactgtttgaaaataaattgtgtacatcagtacccttcacccctaaatactcttaaaaatatggattaaagtagcccttaatgggactagtgcaacattgttttgaaatgctaatttttaacaaatgctcaaccatttattaaagactcttaaatattttaaggtcctattataaatatcttcatgaggaaaaggtatagaatgccaagttatgatggtataaatgagtgaatgtttcagcctttctcaactaraagtttctcatctgaactacaaaatacagtggatgatttgagtgactattttctcaattcctccaaggatggtacataactagtgccaattcagatgcagaggggagaagttaattcattccatacaatggatgtcttgggcttaattctctcctgggaacccaggttagttggactgcatatatggcaaagtcttaaaaggattttgctttgactggcttgtgatgtttatctaaawaactttttttttttttttttttttttttttttttttttttttagattacaggtccaccaggttgkggaaaaactcagttttgtataatgatgagcattttggctacattacccaccaacatgggaggattagaaggagctgtggtgtacattgacacagagtctgcatttagtgctgaaaggtatgagattttattttctattataatgttttacttttgtaacttatatacagcatgaaacatttacacataggttaacatttaccacccctcccccttgccttttttttttttttgagatggagtcttgctctgttgccgggctggagtgcagtggcacgatctgggctcatggcaatctccacctcttgggttcaagcgattctcctgcctcagcctcccgagtagctgagactacaggtatgcaccaccacacctggctaattattctatttttagtagagacagggtttcaccatgttggccaagctggtattgaacttctggcctcaagtgatctgcccaccttggcctcccaaagtgctgggattataggcgtgagccactgtgcctggctttttttttttttttttttttgagatggagtctctctctgtcgcccaggttggagttcagtggcaggatctcagctcactgcaacctccgcctcccgggttcaagcgattctcctgtctcagcctcctgagtagctgggattacaggcgccctaccaccaggcctagctaatttttgtatttttagtagagacagtgtttcaccttattggccagactgctcttgaactcctgaccttgtgatccgcctgccttggcctcccaaagtgccrggattacaggtgtgagccactgcgcctggcctaaattggtctttttataaatgtatcccagtagtaaatgaataaggaatgatagaatatcaccaaattacaaactctgacaatctaatggatctaggcatttaacatcacaaaaagatgacgagtcactggggtactttctgatggaagaacaatcaaatttgaatgtgatcaaggcttcagatccagccaccaatttacaacctagctagagaagagaggaacacatcaaactgctctagaaaatgcaattagcagaatccaaactgtgggaaataacagaacaaacaacttggtttctgtaacaaataaattgtaagattaaaaaatagttggaaggggaacctttggattaaaacagatttaaaagccttattgatcaattgctgtgtgattaacttatttggatcttgacttaaataaatggttaaaaaaaagaacagaagaataaacattgagactactggaaatttgaacatgaaaatatatttgagattaaagctggtaaagactggttcactcaaattgtccaagtactctttaaaatgccaatgactagccttcgactaacaagccaagtaggtattaaatagccagttatgtcataaatagctaatgttcaaatagctcttacaaaggtcctggggaatttgggtaaagaattcaaagattaagattatttttataacagcagttcagttcactgtaatggatttctgctttctttgcaccacatacaaaacagagtttaggatgtcttcttaaggaggaaactgttgcatgttattttattaccagtattacagttcagagcagtgtaaaaaccttatcaatgaattgggtgatatcagcatacatacagaagactagcaggtgacttgtctgcattttccaaatgaatttgtggagagtcttatgttttttgtctttgcatagagccttaattatttactttttgaatcccccatatttacttatttctccttcatatctttttctgccaatgtgcatgttggtatttacatcagaggcaggttggaaaatgaagaggtaatattttagctcctttgttggaattacgttgcatagttcacaaggagctcttatgaaggtcatttgagaataggggttgaactttatattgtatttggttttttattccattctccacaaggcttaaaatgagtgatcatctggctcacacatggaatggattttgaggtctggtgatagggccaagtagaataaaaaatatgaatgctctccgatatatatgccagatttggcattcttatactaccttctagtttgtcatggtgggtcatagaatggaactggccctgtagtgtctgatcacatttcattcattctgttacaggacagcttaacccctatttggaattatcaggaaaggttggccaatcggttaggaaagcttactgctgcagataactgagtatccaaagaacagtagcttaaacaaaaagaggtttatttctctcatataacaagacctgagtaggtggttgctggcactgggtcactcaggtctcagtgatgacagagagacctagggcatgcacattttcagacatyggattcattctgtgctcaagtcagtgtgaagaaaaagggccagctatatcttttatcaggaaagtgtacttttattcataatatctgcctcctcccatctgtggatttcctttttgttgcctgtagtcctcttgtagatttctcactgagtcacctctatatgtaaaaagaggctgggaaagtgaggggagaagatcgtcgtaacaatcatgatgagttgtctggttaatattgctgcctgaataaaactggggctctcatagcgaggaagaagtggaaatggatattggattggtaattaacagtttctgtcccagccccagctgtttctggacttagagaagaggtaaggcagggaaatatgagacgcaaaaaggactatgttgtagctctgtatgtgttcacattgtctccactttgtgcttgcaaagctagccggctaaccagcacaaatgagaaagtgtttaaaggattaatatgatgaaggattaaaggattcacatatatagaatttagggtacgtgagaaaaagttgaaaataatttcttcctataaatatctagatatctttttactaagaaggagagagaaatcaaaggaggaataaatacaaactacttaggtttaaaatgtattaaagagggaggagccaagatggccgaataggaacagctctggtctacagctcccagcatgagcgacgcagaagatgggtgatttctgcatttccatctgaggtaccgggttcatctcactagggagtgccaaacagtgggcgcaggtcagtgggtgcccgcaccacatgcaagccgaagcagggcgaggcattgcctcactcgggaagcgcaaggggtcagggagttccctttccgagtcaaagaaaggggtgacagacggcacctggaaaatcgggtcactcccacccgaatactgtgcttttccgacgggcttaaaaaacagagcatcaggagattatatcccgcacctggctcagagggtcctacgcccatggagtctcactgattgctagcacagcagtctgagatcaaactgcaaggcggcagcgaggctcagggaggggcacccgccattgcccaggcttgcttaggtaaacaaagcagccaggaagctcgaactgggtggagcccaccacagctcaaggaggcctgcctgcctctgtaggctccacctctgggggcagggcacagacaaacaaaaagacagcagtaacctctgcagacataaatgtccctgtctgacagctttgaagagagcagtggttctcccagcacgcagctggagatctgagaacgggcagactgcctcctcaagtgggtccctgacccctgacccccgagcagcctaactgggaggcatccctcagcaggggcagactgacacctcacacggccgggtactccagcagacctgcagctgagggtcctgtctgttagaaggaaaactaacaaacagaaaggacatccacaccaaaaacccatctgtacatcaccatcatcaaagaccaaaagtagataaaaccacaaagatggggaaaaaacagagcagaaaaactggaaactctgaaaagcagagcgactttcctcctccaaaggaacgcagttcctcaccagcaacggaacaaagctggatggagaatgactttgacgagctgagagaagaaggcttcagatgatcaaattactccgagctacgggaggacattcaaaccaaaggcaaagaagttgaaaactttgaaaaaaatttagaagaatgtataactagaataaccaagacagggaagtgcttaaaggagctgatggagctgaaaaccaaggctcgagaactatgtgaagaatgcagaagcctcaggagccgatgcaatcaactggaagaaagggtatcagcgatggaagatgaaaggaatgaaatgaagcaagaagggaagtttagagaaaaaagaataaaaagaaatgagcaaagcctccaagaaatatgggactatgtgaaaagaccaaatctacgtctgattggtgtacctgaaagtgacggggagaatggaaccaagttggaaaacactctgcaggatattatccaggagaacttccccaatctagcaaggcaagccaacattcagattcaggaaatacagagaacgccacaaagatactcctcaagaagagcaactccaagacacataattgtcagattcaccaaagttgaaatgaaggaaaaaatgttaagcgcagccagagagaaaggtcgggttaccctcaaagggaagcccatcagactaacagcagatctcttggcagaaactctacaagccagaagagagtgggggccaacattcaacattcttaaagaaaagaattttcaacccagaatttcatatccagccaaacaagcttcataagtgaaggagaaataaaatactttacagacaagcaaatgctgagagattttgtcaccaccaggtctgccctaaaagagctcctgaaggaagcgctaaacatggaaaggaacaaccggtaccagccgctgcaaaatcatgccaaaatgtaaagaccatcgagactaggaagaaactgcatcaactaatgagcaaaataaccagctaacatcataatgacaggatcaaattcacacataacaatattaactttaaatgtaaatggactaaatgctccaattaaaagacacagactggcaaattggataaagagtcaagacccatcagtgtgctgtattcaggaaacccatctcacgtgcagagacacacataggctcaaaataaaaggttggaggaagatctaccaagcaaatggaaaacaaaaaaaggcaggggttgcaatccgaatctctgataaaacagactttaaaccaacaaagatcaaaagagacaaagaaggccgttacataatggtaaagggatcaattcaacaagaagagctaactatcctaaatatatatgcacccaatacaggagcacccagattcataatgcaagtcctgagtgacctacaaagagacttagactcccacacattaataatgggagactttaacaccccactgtcaacattagacagatcaacgagacagaaagtcaacaaggatacccaggaattgaactcagctctgcaccaagcagacctaatagacatctacagaactctccaccccaaatcaacagaatatacatttttttcagcaccacaccacacctattccaaaattgaccacatacttggaagtaaagctctcctcagcaaatgtaaaagaacagaaattataacaaactatctctcagaccacagtgcaatcaaactagaactcaggattaagaatctcactcaaaaccgctcaactacatggaaactgaacaacctgctcctgagtgactactgggtacataacgaaatgaaggcagaaataaagatgttctttgaaaccaacgagaacaaagacacaacataccagaatctctgggacgcatttaaagcagtgtgtagagggaaatttatagcactaaatgcccacaagagaaagcaggaaagatccaaaattgacagcctaacatcacaattaaaggaactagaaaagcaagagcaaacacattcaaaagctagcagaaggcaggaaataactaaaatcagagcagaactgaaggaaatagagacacaaaaaacccttcaaaaaattgatgaatccaggagctggttttttgaaaggatcagcaaaattgatagaccgctagcaagactaataaagaaaaaaagagagaagaatcaaatagatgcaataaaaaatgataaaggggatatcatcaccgatcccacagaaatacaaactaccatcagagaatactacaaacacctctatgcaaataaactagaaaatctagaagaaatggataaacttctggacacatacactctcccaagactaaaccaggaagaagctgaatctctgaatagaccaataacagggtctgaaattgtggcagtaatcaatagcttaccaaccaaaaagagtccaggactaaatggattcacagccgaattctaccagaggtacaaggaggaactggtaccattccttctgaaactattccaatcaatagaaaaagagggaatcctccctaactgattttatgaggccagcatcatcctgataccaaagccgggcagagacacaaccaaaaaagagaattttagaccaatatccttgatgaacattgatgcaaaaatcctcaataaaatactggcaaaccgaatccagcaacacatcaaaaagcttatccaccatgatcaagtgggcttcatccctgggatgcaaggctggttcaatatatgcaaatcaataaatgtaatccagcatataaacagaaccaaagacaaaaaccacatgattatctcaatagatgcagaagaggcctttgacaaaattcaacagcccttcatgctaaaaactctcaataaattaggtattgatgggacgtatttcaaaataataagagctatctatgacaaacccacagccaatatcatactgaatgggcaaaaactggaagcattccctttgaaaactggcacaagacagggatgccctctctcaccacttctatttaacatagtgttggaagttctggtcagggcaattaggcaggagaaggaaataaagggtattcaattaggaaaagaggaagtcaaattgtccctgtttgcagacgacatgattgtatatctagaaaaccccattgtctcagccgaaaatctccttaagctgataagcaacttcagcaaagtctcaggatacaaaatcaatgtacaaaaatcacaagcattcttatacaccaacaacagacaaacagagagccaaatcatgagtgaactcccattcacaattgcttcaaagagaataaaatacctaggaatccaacttacaagggatgtgaaggacctcttcaaggagaactacaaaccactgctcaaggaaataaaagaggatacaaacaaatggaagaacattccatgctcacgggtaggaagaatcaatatcgtgaaaatggccatactgcccaaggtaatttacagattcaatgccatccccatcaagctaccaatgactttcttcacagaattggaaaaaactactttaaagttcatatggaaccaaaaaagagcccgcatcgccaagtcaatcctgagccaaaagaacaaggctggaggcatcacactacctgacttcaaactatactacaaggctacagtaaccaaaacagcatggtactggtaccaaaacagagatatagatcaatggaacagaacagagccctcagaaataatgccgcatatctacaactatctgatctttgacaaacctgagaaaaacaagcaatggggaaaggattccctatttaataaatggtgctgggaaaactggctagccatatatagaaagctgaaactggatgccttccttacaccttatacaaaaatcaattcaagatggattaaagacttaaatgtaagacctaaaaccataaaaaccctagaagaaaacctaggcattaccattcaggacataggcatgggcaaggacttcatgtctaaaacacttaaagcaatggcaacaaaagccaaaattgacaaatgggatctaattaaactaaagagcttctgcacagcaaaagaaactaccatcagagtgaacaggcaacctaaaaaatgggagaaaattttcgcaacctactcgtctgacaaagggctaatatccagaatctacaatgaactcaaacaatttacaagaaaaaaacaaacaaccccatcaaaaagtgggcgaaggacatgaacagacacttctcaaaagaagacatttatgcagccaaaaacacatgaaaaaatgctcaccatcactggccatcagagaaatgcaactcaaaaccacaatgagataccatctcacaccagttagaatggcaatcattaaaaagtcaggaaacaacaggtgctggagaggatgtggagaaataggaacacttttacactgttggtgggactgtaaactagttcaaccattgtggaagtcagtgtggcgattcctcagggatctagaactagaaataccatttgacccagccatccaattactgggtatatacccaagggactataaatcatgctgctataaagacacatgcacacgtatgtttattgtggcattattcacaatagcaaagacttggraccaacccaaatgtccaacaatgatagactggattaagaaagtgtggcacatatacaccatggaatactatgcagccataaaaaatgatgagttcatgtcctttgtagggacatggatgaaattggaaatcatcattctcagtaaactatcrcaagaacaaaaaaccagacacygcatattctcactcataggtgggaattgaacaatgagaacacatggacacaggaaggggaacatcacactctggggactgttgtggggtagggggaggggggagggatagcattgggagatatacctaatgctagatgacgagttagtgggtgcagcgcagcagcatggcacatgtatacatatgtaactaacctgcacattgtgcacatataccctaaaacttaaagtataataataataaattaattaattaaaaaaatgtattaaagaaaacaagaagaaaacccaggagatgatatacttaaaagcactttggaaaggtcagttctatttttagaagcaatgcactaaccaatttattttacatgtcttttagaagatagtaatctaaaatagttgttaatcatgcttgttcatcatagactgcaattgtatctccagactatttaacaattttaacaggtttgttgaacccacagcccgtgggccgcatacagcccaggatggctttgaatgtggcccaacaaattcataaactttcttaaagcgttatgactttttttgtgatttttttttttaaagcccatcagctatcattagtgttagtgtrttttatatgtggccctagacaattctttttcttcctctggggcccaaggatatcaaagttggacacccttgaattagataattgtgtagcctggcactaaccagactgagttacagggactgccttggggagaggggaatgctattcaggcaaagatctagatcctcttctgattgatccaragaagatctgctgtttttttgttgtttttttttaacctactggacttctgcttaagatctcatatagtcttaggcaccatatgcttgtatataccttgagaatgtagataaatagattaatccagtgacccatccccatattctagtctatgaaaattttggcaaccatgagaattccagtttacatgaactgaattaacaatatattgtccgtattagagacagttacaaaaagatggaactgtgggttaagaataaaaaatgaaggtaatatggatggcaaatagtaatagaagtattgaaataatgtttttggagaaataaaatggataaaggaaagtaaagttgggtcttagaactgcaaattgaaggggatcaataagcatgtgagaaaaactgagggatgtagggaagtaagagatgagagccaggactctggaaggtgggaacctgaggaggtaggatataggactggaattttaggaggtagaagtggatattcctgagttgtaatraaatcagaaaagctttgaaaattgggaagacaattagtccagcaagggaggaagacattaatcaaataatcactaaaatgtgaaattgtaaatattataacttagtatacaaaggagaggtacttgtattggtagtgtgtgggagcaatggctaagcttagatctgaggaagctgctgtatttggtgtgcatgtcacctctcagggtgccaagttccccacagatagttatctttaacacctagcaaactacagtcatgtgctacataacaacatttcagtcgaggatggattgcatataagatggtggttgcataagattataataccataatttttctgtatcttattaaagtttagatacaaagatatttgtcactgtgttacaattgcctacaatattcagtacagtaacactctgcacaggtttgtagcctaggagcaataggctataccatatagcctcagtgtgtagtaggctatactatctaggtttgtagaagtacactttatgatgttcgcacaatagtgaaattgcctaatgacacatttctcagtacatatccccattattatgcgccatacagctgtatttagagtgtcattctttctggatttgtatataaaattggaggcatagcagggagtggtagtggccagccatgactcaggctgattctgaaggtaataccagtgtggtcttaagaccattgacatattgacatatttgcttgttggtataaatttggaatctttgacccagaaagaaacaataggggagataaattccctcttaatcatttttttgagatagtttcatgacactgggtaggttttcctcagttcagttccagctgccttatcatttgtgaatctaggtgaattagtggggagggagatcctgaaaagtttctcagatagaaagtagaattagtcataagtacttattactgtaacaaaggtttggaatattctggaatctgtaatgaattaatagattcatatcattatattcagtaatatatattgaatgaatgaacagagatatagtacgtatgtacaagaagctttgagaagcaataagcctacattttagcatatttatgatgctacattttaactaagattttggaaaactttttacattaagcgtatgttttatttcaagttggcatgtggtcactaatgaaaagcttttatttttccttttatataagagctatgaagtcacatagggaactaataattttgtacagggttttgctccttaattgacatatgccttttgattctggaactgattacgaaagaagtctatctgtatccatgagcagttaactctttccagaattggaatctttaaagtgcattgtagctatcaggtccaaattaaggcatagatagtcacttgccaggtgagatttgatggcaaaagaaaaactaaaatgtggcctagaacttctttttcttttaaaagaggarcacttctaaccattttctgaggcattctaccacagtaaatcctttgattgtgggattgatagttagcattatttgtgtatcagaaatgagtcgttctggcagtgggacattgagagtggatgtagggttaggctaagttagatgatatggaaggggaagttgggaagtcggtggtgttttacctcaggacatctccactagcaattgatatgcaaatgattcatccagggagggaggagattttagaaataaagctcttaataggttttcagggatattgttttggggtttgatggactaagagtataaaggtagcttttctgacagcatggccctttagaatggtactacctccattttatgaattagtagttatcagttgagggagtaaggcagacagtttcccctttagtaggtattttgggaatttgtaggggggtgcaagaagaaattttttttttacagtaataaatagatgtggtccagggatgctagccattctgtaatgtgagggtcattaagactgataatgctataaataatattttataaattagagcattttgcagcatgatataattgacattcatctcagttgatgcatacagcagcactgtcaggtaaggagcggggtattatgatcttcattttagaaataagcaaaatgggactcagaaaccatgtgatttgcccaagatcatatggctaataagatagctgagaggtgaactcatatcctctttccactgamctgtggttggaaaaaatgattgactccgagaaaagatccaagtagtgttttcattcattcattcagtaatgcctgtttgacatttgggctttctgtctatgaatctatctttatcccatttcccattgggcttctagtctttttattcttgatttgcagaagctttttgtgtgtcttctagatattgtttgtcagttttacacattgaaaatatctcctcctgctctgttatctgtcatctttgtagtgtcctttattgaagagaaatttataatttaaaaaaatttattagagacgaggtttcactcaggctagagtgcagtggcacaatcatagctcactgctgtctcgacttactgggtacaagggatccccttgctttagcctcccaaatagctgggactgtagacgtgtgctaccacgcctggctaattaaaaaaatttttttgtagagctggggtctcaccatcttgcccaaactggtctcaaactcctgggctcaagcagccctcctgcttccgcctcccaaactgcttgaattccaagcataagccgccatgcctggccagaaatttgtaaatttgaagttgttgcctaatggtattggttttcagatcttaattaacaagttttcccccactattagttatcaagatattgtcttacagttttttcctaatatagttatagttttatcttttatgtcaatatctttaatccatcagaaatccattaaggatatattttaaatttttgtataaactgccacattctcctctagaaatattttacataattgtatctcaaccaatagtactttgagagccttcatcactgtttttagtttctttaattttgtcatacttgcgggaaaaaagtgatagctcattgttttaactattgtgaaccaacatcttttcatatattcattgtccatttatatttctttggcaaattacctagaaatacactttgtccattttttcttattgatatatataaatactttgtgtattatggatatttatgtttatatgatttttttcctgggctataattctataatttatctttcaactttggttatgctatcttttgttatctatgatttctttggtggttgatctttcagattttgctttatggctgtagtttttaaagttttaattttcagggcccttaaactctaggtggattatatcaattgatatttatcatattaggaatttaaactggaaaatttaaagaatatttaactattatctattatgcagtaagtccattacatggtatgtgtttttttgtgtgtttgtttttgtttttgagatggagtctcactgtcgccgggcttgagtgcagtggtgtgatcttggttcactataacctccacttcctgggttcaagcgattctccttactcagcctcccgaatagttgcaattacaggtgcccaccagtgcgcctgccaccatgcctggctaatttttgaatttttaaattaaagacggggtttcgccatgttggccaggctggtctcgaactcctgacctcaagtgatctgttcatctcagcctcccaaagtcctgggattacaggcgtgagccactgtgcctggccattacatgttagcatattgtaccaaacagggctccattaggaaaatagaaccagtagaacatatattaagagagttattgcaaagaattggcatatgcagatgtggagttgtctgaaatccatagggcaggctgttggaaagggcaggctagaactctcaggcaagggcctaagctgtagtccataggtggaatttcatctttttaaaggaagtctcagctctgctgttaaggcttttcaagtgattgaattagcccacccagattatgtaggataatctctagtacttaaagtcatctgtttatggacattaatgacatctacaaaatcctttcataacaatgcatagattagtgtttgattgaataacaggagactgtggactagccaagttgacacaaaactgactgtcatatattttttgtttgttttttgttttttttttaagagacagggcctcgctctgtcacccaggctggagtgcagtgacatgatcatagttcactgtaacctccagctcccggacttaagagagcctcctgcctcagcctcctgagtagctgggactacagatgtgagccactgcacctggactttacatgtattttttatggaaaataaatacatttttgactaaaaaaagtgaaaaaagagtggcgttgttttatgtttttgcaaatctctttagtgtctgacttaatagaagacagcctgattctaatatctgcttctgcattcagtctgttgcactctgttgttttggttgagatatgaagatctggccttatactggttatagttggaaagggaggaatattttaatagtctcttcagataattaaagatatgcttctttgatactacaccaggaattgagtaatagttgcttagaggttagttgtgatatagaatctgaaaccatattattgcattttttctacagttacattaaaatctattcatctgtcttaggctcttaatggatatttacctatgcatgattttgtaatattatgcatttatcactcagaaaatattggttcactgtcttatggagttctaaatgttgacacattttattactcaatataaaaaaatttcattagtatctccactgatctgaacaaaaagtatttaagtattgggatgcagtcaaactcatggtagcagatgtaagttttttaggaatctgatttttcattaaaagcttgaattttatcattggcaataaatattgccacttgtttttcttgaagtgtcgggcttactttgctcattttgagaaaacgtctaccaaatacttaagtcagaaaaaccataacttatctatcaatcattctttcaagtaaaaatggtctcccatggaaaaagtgacttcttagtctgagaacccaattgtacagatgtttttccttgagacaatggttgtacttcagaatgtagtagaagtgcttctattttgtcaaacagaatattaaaaatatgtctgtgttctaataaaactctattgacaaaaacaggcaatgggccatagtgcacagtttgacaacccctgctttatttaactccttgagcaaatgtagaagattaataatagccgttttgaggtttttatccatgaatgccatcatatatataattttttaaatctgtttttattgactgatttttctcctggtaatggatcttttcctcttcctttacttgtctggtaatttttcaattcgatgttaaacattgtaaattttacgttgttggtgggtgctggattttaacatatgtttttcaagagtgttaggttttgttttaaggtacattttagtattagtttgatccttttgcaggttgcttttctatgttgttatggaaaaatcccaggtacagtcatgcttcgcttaacaattgggatatgttctgagaaatgcattgttaggcaatttcattgttgtatgaacaccctacagtgtacttacatgcacctagatggtatagcctactgcgcacctagactatatggtatagcctattgcttctaggctatgaacctgtacagcatgttactgtattgaataggcaattacaacacaatggtaagtatttgtgtatctaaacaaaggaaaggtattgtaaaaatatactatataagcttatgggaccactgttgtataagtgatgcatcattgactgaaatgtcgttatgcagcacatgactgtggttttttattctgaaacttatttagcttcactactaaggtaaaatccttctgaaaattctgcccaatgcccagtgtataataaggtctctttattcttcaccttgtgtaaacccgaactgttctcaccctgtgtgggcactaggaagtgttcagtctgatactttctggtggttctttcctcaacctcaagtagtttcccttcacacatgtgcagattagttctcaagtggccctctctgcagatctttgcagtgctcactctgcacacctgcttcctctctggtactctgccccataagttctagccaccttagctttcccaaactccgatccccatctcctcaactcaggttgtctaccaggctctgtttactttccctttcttgtgttgcagcctggaaactgcctctggagcaaactgaggtgattgtaagctcattgtgtttgtttcctttctctcaaggattacagtctcaagctttctattgttcagtacctgaaaactcttatttcatgtattctgtctgattttctacttattattttagtgcaattcatgtaccagttaatcctttgtgggctaaagtggaaatcccttctttcattctctcttgagttcactctatccaggcttaagtttccagctctataatgcaactgatttaaaaaattttatccaacccaatagcagcattcgaaagagttgatcactcactttttcttgaaaagctctcttcccttgactttttatttttttagacaggttctcacctaactctgtcacccaggctggagtacaktggtgctatcatggttcactgcagctttgacccctcagactcaagcaatcctctcacctcagcctctcgagtagctgggaccacaggcataygccaccatgcccagctaattttttaatttttagtacagataaggttttggtatgttgccctggttggtcttaaacttctgggctcaagagatcctcctgccttggcctcctaaagtgttgggattataggcatgagccaccatgcccagcccacttggcttcttggaactattctctcttcttttacacctaccttcttggtcacctcctcctctcagtcccttttgctggatcctcctcatcattttaacttctaggctttggggaatcccagaactcagtcctaggaccttttctcttctatatctgtactcaatccctaatatcatctggtcttatgatctttaaaatcttttataggctgtaactcctattgatatctgaattctgagctttcccatgaacttcagattcatattcatttgcgtaatgacatggaacttggataggtttacatacatggatttcctgatatgtccaaaactgcatttttgtttcccccatgaaggaaataaaacatgcaaataacaccaataaccaaaacctttatgtgaatcttgtcttttctgcttcaataaagttgtgattccattcttctagacactcacccaattagtcaagaaattctttctttttttttttgagacggagcctcactctgttgcctaggctgagtgcagtggcgtgatcttggctcactgcaacctccatctcccagattcaagcgattctcttgcttcagcctcccgagtagctgggattacaggcgcccgtcaccacacctggctaatttttgtatttttagtagagacrgggttttgccatgttggccaggctggtcttgaactcctgacctcaggtgatccgcctgccttggcctcccagggtgctgggattgcaggcgtgagccaccgtgcccggccaagaaattctttcagctcctcttttgaactatatcttgagtctagttacttctcatcacttgacctgttacttccctgggtgrggtcactaccagctcttaactggtcactaccagctcttatctgtgctagctgatctccttgctttcattcttgcccaagcctcttctccattgggcagttagagcagtccttttaaaaaaagaagtcagatcatgttgttcctgcttctaggcttcctattttgctaaataaaagctaaaaaaaaaaaataccactttagcaaaaaaaaaaaaaacaaaaaccacagacctaaaggtcttatgtgatcttggccttggctagctctttgttttcttttattctccctcttactctctgtgttccagatactttagtctctttgttgtttctcagacacaccaggcatctttccacatgtaagcttttgcacttgttataattctctattcttgtgtgctgtttcactgggtatccacatggttcattttcttatctcttttaagcttttgctcaaatgtcaccttattaataaggctttgtcagttcacctgacataaaatataaaatagcgctagccccacctgtcacattctattctctcatcctgcttcattttcctctacagccttattacctcatatataatatatatttatttgtttgtcttcctcagtagaatttaaaccctatgaggtaagggcttttctttttcttttggtagtggtggttgttcattgccatattctcagcacccagaacagtgcctggcatatagtaggtcctcaataaatatttgttgaatgaatggatcttagtgctcattttgaaaagaatgctttttataaacagatatccactagatggcattattttcaaactttatgtaattaatgtctgggagcaaatgataggttattttctgttttttgccctaaacaaaaaagatctttgcaatgaagattgtcacaagaagttactaggatgaatgtgaggcatgtcgaatattgcatttatatttggtttttgatttatatatttttagatgtttattataaaataaaaaacatttagagaaacaaaattacagcatattggtgtgtaaatgatccatttaatacagttatttagcatggtaactgtgaacaaaggttgttcatgtctatccattgaccaccattccttttgtgaggccttcagcaatggcaaagcagcagtaagttccagagcctttcattactgaagccactagtggaaatccagaaaattgtcagctgttcagttcttgttgctaatgagctaggtactctcaatctggttcctaatcaactgggcattcaaattttgaaaaatttccatgtttctagaagatgttgccagacctatcctgttaaaaactggtaggttctaagtgccagagatttttagctgacttctctgaccagcactaaactcagcaaatagtttccctaatcaaaaatttacacttttcccccaaaccctcaggatttggctgctctgcctgtgccaatgccatctcatttcttgatttcctcmcttacctcatttccttcttccatttcaatccctgtgcctctcttaagctcttttcctggatggttatttgatccattttattctcactcttcacacctcttttggtactattccttattcatgaagtattttttcctcttcctgttcaacttagctatgtatatttttcttttcaaattgttcaaaaatacacttaaaaacagttgttgaagttctctcttctcttttcctgttttgggcttttctcttttatttctgatcatagcaaatgtaaggacttgttttggttatgtttttaaagttcccagcttcttctcagaactctaactatttagaaatgaaaacactgttcttttgtacttttgagtctctaaatggaaaacaaaatataggatgctttttgagtttacagcctctcctcccagttcccctgggatggctaagtactagggctgataaaatgtcatttcatttaaaatgaaatgtgatggttaaactcaaaacatttaaaatgaaatgagatggttaaactcaaagacttatatttttaacatttttaaccataaatatgagaaatttctagtaatgctttccatatcttataatatgaatgatggcattttaacttgtcactctcttgtgtttggcctactgcatgtattaaactggctttgaggccagaattcagtgtttagaaaatcatgttttgtttactaagaaagtattggaacattaatttatttgggccataatttaaaggaattattgcatagcattaatttgcatgaattgtttcaattgagaaagtgtatttttctggaatgagacatgaagacttactgatatctattataatacaatataccatatttgttcaaatatacttatttcattcaagaaaatgaaagcattcttatttagtaaacatatcttatagctgctactctaaatatcacttacaaaaaacatatttaatcccagaargataaatctcaagagacattgttgtttgctcaagattagatgagatccaacagcccttgctggttgcatgctctgactgctaacctctgttagtgcttacaaaagagagcttaattctaaatctgtatattaagccattttgcttatacctgctctattgataaggcttaggagtttctcaagtaaaattaattagagattcagcaatgtggctttaagtagaattgactgttttcgtttgtgctatttttttcacccacagactggttgaaatagcagaatcccgttttcccagatattttaacactgaagaaaagttacttttgacaagtagtaaagttcatctttatcgggaactcacctgtgatgaagttctacaaaggtatgctgctttagattttgattttttagtaatgcgttgaaggtttatgttttatcttttatgtttcagcttctaagtgaaaaaagtctttataggttagaattatgtggagtaactttttcagtgttcttctttgttatagccttttggttgaagtctttcttgaaaaacaaaaaaaattaaatgaataaaatgttctrtatttaattaattaagtggtgtattatttatctattgtttcattaacaaattgtctcacagtttagtagcttaaaacagcaaatacatattatttcacatagtttctgagggttaagtgtctgggagtagcttagctgggtgtttctggctcaatgtcgctcaagaggttatagtcaagctggtggccagggctgcagttatcttaaggcttgactggagctggagtacctgcttccaagctccctaatatagttgttggaagccctctgtttcttgctggcagtgggcaagagacctttgttccttaccgtctgggcctctccataaatcacaacatagcaagttgctttcctcagagtaagtgacctgagagactgggcaagtgaaagagtacccaagatggaagctgtagtcttttataacccacactcagaaataaggtaccatgatcttgtcatatgcttgtggtcatacagatcaagtctggcacactgtgggagggacctatacaaggatgcaaaataccaagaggagggagtaagtgtgggccattttgcagactggctaccacaagtagttttaccccagaattggagcgttaacattatcttaggagaatcaaggaattctgaaactacacagaaacagtttgctctgtttccagaaaagtatgatatgtctacaagttaggtttactgaattcttgcaaatcattactgtaacttaggaaagaatagtttattgtttttaagttgcttagcctttgcaatacctttatttatttattttatcttaaatttattgactattttataaattcttcttttataggattgaatctttggaagaagaaattatctcaaaaggaattaaacttgtgattcttgactctgttgcttctgtggtcagaaaggagtttgatgcacaacttcaaggcaatctcaaagaaagaaacaagttcttggcaagagaggcatcctccttgaagtatttggctgaggagtttkcaatcccagtaagtttttctttttttctcttttttcttttcctttcttttgtttcttttatattacattcactgacttatggtatcaaataataaaattagaggaaaatgtaaaacagatgacttwttaaaggtagtacagtctaattgctatagcaaacatcgccatcatcttaaattagctcatctgctgagattattttattattttaataatttgagtctggagtagatttaaacgatgtttttaaaagttcctatagtccctccttttcttccttctcattgtttactctttgtgtgtgctttgtatcacatttctcacactgcagtaaatataaagtagtaaaacttcatgaaattgcctagatctatttctatataattaaaaaaaatactgcagttgttgttagttttgttttaagtattttaggtttagatactgtgttattgtgttcagcgctgttttgtgtacaataggatttggtttgcttcaaatggtcagaggtcaaccattaagagatgttggaatgatagtaatgaaagtgtcagtaagaaaaccttgaaagattatttgtggcatggctttttgtagcgggcattgtgatcagaaatctgaagatgacaggmtattacaagggcttgtgatgtgtaacctgcaagacgtaagtgtgtactaagttacactcccatctgcagtgtgtcagggagttttagtcgttgttccacagcctcatcaacattcaggcttctcaattttagtcatgcttcatctcaagaaaagatagttccttaaactgagataaaatttggttatgattttataatttttagatttgtttttggaaaattaaaatcttggatctttgcaacataaagaatatgtataaataatataaactatcacacagcctttgaggtttataaaaccaaggaagaagtcaagggagaaaatatgacattcaaaaagttctgcatactttaatggctttttagtttatattttgaattaaagtcaagtgctgttaagtttgtcttgggtgatgttcatcttttacattttattgtagttggttaaaatgataaattcaaatttatatttttcctgatcaaggagaataagggaactttgaaatactgtataaagatacttgattgaatagaaagttatgtatatagttggccctctgtatctgtgggttctgcatccatggattcaaccaactaaagataggagatatttgaaaaagcaatgggtgtggtagtgtgcccctgcagtctcagctactcaagaggctgaggtgggaggatcacttaggcgcaggaggttgaggttgcattgagccatgttcatgtcactgcacttcagcctgggagacagagtgagaccctctctctaaaaatatatatatatatttgaaagaaaagaaaaggatagttgtctttgtactgaacatgtacagacttttttcttgtcatgattccctatagttaagcagagatttacatagcatgtacattgtattgggtattataagtaatgtaaagttgatttaaagtataccagagaatgtacatagattatgtgcaaacactgcaccattttatatgagggacttgagcatccgtggattatggtatctgcagaggagtcctggaaccaatcccccatggatacagggggatgactatatattcttattttattattaattcatactgttgcttgacttaattccgtgcaaaataaaattcactttttaaatgttgtgtttgtttgcttttaagtagtaactgtaggctaatgcttttcagtttttcctaaggtgatttattttcccaagtgagaaaggggcactgcttttctttgtttttaatagaaccctctgaaaaaataggtactgaatatcccatttctatgcctttggctttgtttctctatttagaaataaatgcagattatactatgtacttatataactgtgatatctgttttttgtgacaattaagattgtaagattggttttaaaaggattttgaaaaatatttcctttagaaaatgttggaattttcctagctaaattgatacatttaaatggaaaatctctcacacaggtccgagatttaattaaaaaaaaaaaaaggaaatcatgaacttttacacatttatactgtactttgaacaggcaccatagtactgttcaaattaattatgtcaatttaatatgttatatatgataatttgctaaattaaattattgcttgctatatatataagcttacctcacagattgtcttgaaatatgtatataaatataaatatataaaaataaaaaatatatataataaaaatatataaatatataaaatgtgattattcagcttttccccccctttctctatttgaactagtactagaaaacctcgtcttttgggaagggtgacatcatttggcccttatgtgcgcatgaatgcatttaagttttaagtatgctgttgcttttttctacgttagtccctgagaattaaagaggaattaatcgatatcacttgattgaaaacagatgtattaatatctttcagaagttttcaattataagatggctttactaatattttgaggctatcactgaaatgaaaacataaaattaaaaaattttcacagagaattttatagacctttgagtatgttcagactgcagttttgagaaacagttgtagaagtctggtagaatcttttctcctgaagtttatggaggaggtgtaagtgatactctgccrttgggatggaagatgcggaacctttgtctttttaaagtgttcacactagtattgaaaaaacagtaggctctgaagctgtttagagatactggataaaagtaaccgaaaaaaatttaaatactgctttataaaataaattgtggttatggctatttatgttgactttatcattgacttctaattaccacgtacagaatagttattatacgtattgtaaattatgtatcagattaaaataataggatgtttttgccagaaaggaccttaaagaaaatttagtttggccccttcattttacagatgacaatgaatccgaaaagtgacctgatttgctccaggacactcaacataggaaaggacaaacagtgggtagaatgagagatcttttagctgccagtttggggatttttttttttccacagcagaattttctttttttctgagacatacagaattacggtggactgtaaacttctttttatttatttattattattattatactttaagttttagggtacatgtgcacaatgtgcaggttagttacatatgtatacatgtgccatgctggtgcgctgcacccactaactcgtcatctagcattaggtatatctcccagtgctatccctcccccctccccccaccccacaacagtccccagagtgtaaacttcttaatgacaggattatattttctgtttctctgatttccaggacctagcactgtggataactaatatttaggaggtaacagctaatgaaagtacaattaaggtttatgaaaatagtcttaccatatgtatgtcatatttacattcattggaatatttttctttatcttttaaaacataatttgaatttttttatgcttgctgctgaaattcttatgtttttgtttttaaattgacctttgtagtatgccatcttagttgtattctttttatttattttccattccagagttttataagttgttggaataaaagaaaatgaaaatgcattgcttagataacaggactttcaccttttgaaaattctttggaaatgctttttactggtatttccaaggtctacatttttactttttcagagaattcaacaaatcaatttcagttgttatatgaataatattgaacttttttgtctccccttaatcttcttctacttccttcatttcttgatattgtacaaatgttttctggtgtaaggggaggagtaccagttaacactatttacaaaagaggtttatggagataaatttggatatattattaaatattctaagagggaaatgccttattttcattgaaagttgttgttaaaatccaaattattttactaagatgtgcttataatccgtttttctgtggccatctgtgttcttgattacatgccttttgagaatatccattgctctaatttattgcttatcaaggtttttggaatattagtgattatttttatgtttaaagctgcttagacaaatgaatcaaaatatgtgcattttaaattttgctattttaaagacagttttaaatcattaacaaatggaaagaatttgttctggttttaaagtggacatataacaaggttaaattttttattattatttgagacaagcacaaatttttttttcctctttttaayggtgaacttcatgtgggcctggatttatttatttatttatttattttacaccatgagctgttccattatgccaagtgggtttaatttatgcaggattataccttgtcttagatactaataaatattcaaaatagaaaaataagaaactaggccacttcatttaaaataattaaggttttattaattataaattgggaatattgtgtttataactggtgagataagaggaaaaagaatgtatgtacccaaattcgacatttatttttatcttaaacataaatattcagaactgtcacttttgtgaaagcctgatgaagtcactctgattgtaaagtaggaatcctagacccttgatgtagacatagatatgccattaaaactgcagtyctgttttgctgtgtgtaacattgttgtatcacttttctagaaatgtaatttttggtttactcttattactttcatatttttactgaaaacaagcaccacaggacttctgaggtaagaraagtcctttacaggatttttcttttccataaatgcttactgttggctcactcacatttgawatcagattgttcttaaacctatcctatgttcattcaggtccctgaaactcacagtctagactaaacctttatcagttagtgaaaataattctagaaaragtgtatctttcttttatgtagctctttatgacttctgamactttgtttttattgtttctagcaaaaacctagaaacaacttaaaagttagtaagtaggtgattggctaaattaatgttgacatatccatacaatattatattgtgccactgttacaatgaatggtttagcccagaaatggattcataggttatgcaggcaagggttaattcagctagcatgggttactcatatccagccattcccaaaaaaggcctcttttcaggactgcccttgcctggctcctgggagatgagtgctgggccctgggaatactctgcctagtaagggtgttatatgcctgaggacttgagccacaggtactggtttgatcagattgtttatgcaaacagtgtgatttatggtgaagcctatttttctctggggatctggggactacaatctaaatagctgaggtcatctgcatgcaggcattgcatgcctagtgactgaccctcaatagaaatgctggacattaaggcttgagtgaactttcctggttgacattactttgcatgtgttgtcacacattgttgctaggacaattaagcacatgcatgcgactccactgggagaggacacctggaatcttgcacctggtttctcctggactttgcttatgctccttttctgtttgctcattttgatctgtatcctttttctgtaataagccataactgtgaatataacagcttttgagtcctgtgagtccttctagtaaatcattgagccagaaggtaatcatggggaaccttgacatgcaggggtgctaatagatatgtacaagagtatctatggcagcttaatttgtaattgctcaaaactggcaagatgtattgtagttaatagtattggcatcagtcttaatacattggctttgataattatggtttgtaagatggtgatattaggagaagctgggtgaagggcatttgggaactctaccctttctgcaactttttggtaaatctaaaattgtttcaaaataaaaagttaaaaaaagaaaaggaggtcaggtgtgctggatcacacctgaaatcccagcatttgggaagctaaggcaggaggatcacttggccaggagctagagaccagactgtgcaacatagcaagacctcatcttctcacacacacagacacagacacacacacacacacacacacacacacacacacacacacacaaaaaaacaattagctgggtgtggtgctacacacctgtagtcacagctacttgggaggctggggcgggaggatggcttgaacccaggagttcaaggctgcaatgagctatgaacatgccactgcattccagcctgggcgacagagcaagaccctgtctcaaaataaataaataaatagaaataaataaataaatgaaaaggagagtagggcgggttttatgagtagaagttggctctgggtagtcataaagaaatggcactggctgtatttggagaaggggacttgattttgatgcactggttctcttctatttagtcatctggtcccatacatattatctaatacctcttcaatttaaaccctgctcttcatctttcagcacatcctcttggctccgctttcgaaatacattcagtatctgattactttctaccaccttcattgccatcatcttggttcctggaggctaaaagtactggctttggagttagacgttggtttgaatcttagctccactatttgctaattttatgaccttgaataagtatttatcccagctctaacctttcgtttccatgtttgaaaaatgaggataacaatatctgactcatagggctgtgagtattaaatgagataatgtctgtaatgttcttcacaatgtttggcatattcagtaaaaagtagcctttaattattaattttactagttacctcgttccagatgcctggtgtattttatctctttcctcctaaaatattttttaacaaggctgcaagtgcctcagaaggaagaatcatgtcttattcactattgtatccccctctgtctgtcttactggtggatgctgttactgcctgaaccctcctttatctggttaacttacacttattttttggatctcagactctttttgtctttccttttcgattccacctacagcacttgtgtccaaaactccatgctaggaacaatgggataataaagatgaataaaacatagtatttgcccttaaggcttctacaaataaggtaattgtagaggcaaatcgctctctgtgatataatggagaataaaataagtatcttgtctactgttcctttyctgtttcttaaaatatgtaagtagcttgtaagtaacttctctgtctgtcctttgtttgggactatagattacacagagggaattaaagggaggtagtagagaccttcatagtctctcgggtaaaccctttatcatgtctagctttggtccttaaatgtcccattctttttttctttttattttttgagacaaggtctctctctttcccaggcaggagtgcaatggcgtggtcatagcttactgcagctatgccgagttctagtgatcctcctgcctcaacctcccaaatatctgggactagaggcatgtaccaccatgcctagctaatttttttgatttttagtagagacaggtcttgctatgttgcccaggctggtcttgaactcctgggctgaagcagtctgcccactgtggcctcctaaagttctaggattataggcatgagccactgtgcctggccagggttccattcttatttagaaagtcagtgctcttttggagactgataggtagtggttaaattcataaagcacatgcataattctaaagttgtatgctaagaaaacattggaaatgaaggccagttgtagctcttagtctttagcgttactttacgtatgttacacagtaccttgatttgttgtagaattttctaactgaagatcttaaggttgtagctgagtggcaatcttgttttccagtgagtacagggatgcagagaatgaggtgatttatgtaagattgcttaaggagtcatttggataattgaataatatcacttgccgcttccatcctgggttgttattgtagtatcttaatgggtctgcttctctcttttctgtatcggtaatagtacatatgggtacataccattgctacatcattttcccaaagtgtatytctgatcacatccctcctatgctcagaagcattgtatggtaccatgatgcttatagaattaagccactagactataagcagtatgggggcagagaaactatttgttttgtccacagttgtatcctttgaagctaggacaatgtatggcacataatatatgctctaattaatatttattgaatgattaagtcttagtttaggatatgatataatatttaaagttctcttccttctggctccaacctactcctcccatgttgtcatttctcttctgtgcargctgctggtatactaccccgagacctctctatggctttttagctgtggatgtcctcttctttcatctcttcctttctaaatttttttctttcctatctgagctctcaagttctgtctctcctctgagatttttgtatcactgttttagccccagttaattctaccttcttttgtagtacacatggtcttaacttctaattggaactttaattatgtatttgccttgcagtgtcacttaaatatttgcatgtatatatctgagctcctcagttatattataaagccccctgaaaacagaattatgttcttatgcatcctccatagctgcctatattgaatagtgtcatatattgagtaggtgtccaatatatatttgtagaatgatgtatcacactttttctagttaggcaatttttgaaatgcatgtctaattagatgcctacttcaattcttacactacttaaagggaaaacattctaacattcattctaaaaattgaaaagatactgggaaactaaaacttaagtgtctcccctgcacccctttaaaactgaatgtagaagatttgttgataatttgacagctctgtacctttaatttagtatgatgcatgaacttctgtgagacatcaaccaagattttatacgaagagctgtgatcatcaaggtgggaatttaacatcagtgctctgtacacatagtattactgtaatgccttctttagaagtttaacaacgtcaggtgatattctatgttatgatttttaacttatcaaaggaaagcattgtagagaaattagatcatctcttgaatagaatctgataactgctcactgtttaattaaattcaaataaacagtttgaaatagaatattggctgtatgagagtttggtcaaaggatattttcttgagtttttcaaagacaaaatttgtttttttggttgatatttttacatatcctttgcgtttcttgaatgtagttcacttagttaatacagtacagttaatacagttaccttccaagtaaagctggagggaaaatactttctgataagaaaatatatttcaaataataaaacagtatgatactagcataaaacagatatatagaccaatggaacagaatagagagcccagaaataaacctgcgcatgtgtggtcaattgatctttgacacaggtatcaagaatacacaagggggaaaggacagcctcttcaataaacggtgtcaggaaaactcgatattcacatgcacaagaatgagattgggcccttattttataccatacacaaaaaataaattcaaatggactaaagacttaaacataagacctaaaaactaaaaactcttagaagagaacatagaggaaaagctttgtgacagcagccttggcaatgatttattggatatgacaacaaatgcacaggtaacaaaagcaaaaatagacaaatggaactatgccaaacttaaaagcttctgcatagcaaaggaaataagaaaaggaacaaacaactcacgaaataggagaaaatatttggaaaccacaaatctgatgataaagggttaatatccaaaatatataaataactccaaaactcaatagtaaaacaagaacaagcaagcaaacaagagacaatacaattaaaaartgggcaaaagaactgaatagaaatttctcaaaagaagacatacatatggttcacaggtataagattcacaaagttactaatcataagggaaatggaaatcaaaaccacaataagataacactcacatcgcttaatacggttattatttaaaaacccacaaaagatagtaggagtgggcaggatgtgaagaaaagagaacccttgttcactttttttttttttttgagatggagtttcgctcttgctacccagtctggagtgcaatggcgccatctcagctcactgcaacctctgcctcctgggttcaagtgattttcctgtctcagtctcccaagtacctgggattacaggcatgtgccaccacgcccagctaatttttttgtatttttagtagagatgaggtttcaccatgttggtcaggctgatctcgaactcctgacctcaggtgatccatccacctcagcctcccaaagtgctgggattataggcatgagccaccatgcctggtcccttgttcacttttggtgggaatgtaaattggtgtagctacctgctatggaaaacagtttggaggtttctcaaaacattaaagataggactaccatatgatccagcagtcttatttctggccatatatccaaaggaattaaaatcaggatctcaagtaaatatctgaattcctatgttcattgtaggattattcccaatagctaagtcatggaagcaatctaaatgtccatccatggatgaatggaaaaagaaaatgtcatatacacacacaatgatatattatttagccttaaataaaaaagaaggaaatactactatctgtgacaacatggatgaacctggaagacattacgctaaatgagataagccagacagagaagaacaaagaatacatgatcccacttttactagtatatggaatctaaaatagtcaaactcatagagcaaagagtagaatggtgattgccaggggctgagaggaggaggaaacagggaggtattggtgaaagggtaaaagttttagttacacaagatgataagtcctggagacacagtgcctatagtgaacagtaatgtatacttaagcatttgttgaaaggtagatcttacattgtgttcttatcccatacactgtataaataaagagcacaggtggaaacttttagaagtaatggawgtgtttatggcattgaccgtagtgatggtttcacagtgtacattctccaagttgtatgcattaaacatacacagttttgtatatgtcaaacaaataaaaagccagaaaacaactttaattttcctagttagaatgttttccctttattgaatataagaattcaagaggcacttaattaactttgtaagattaaaaatatttcccaaacatttaagaatctatgtaaaacataacagctgtggtttaaaggttttattatcttccaatacaagtaacaaaatgtaaattagaggatattaaaaattatgtatttttcacttgaacattgtttcctaccccttttttgacttctgtttatctttgatattgaaagataaatattcttgttgattttacatctctattaatttagattcttttttttctttttttgagtcagagttttgctctgttgcccaggctggagtgcagtggcatgatcttggctcactgcaacctccgcctcccgggctcatgctattctcctgcctcagcctcccgagtagctgggactataggcacccgccaccacgcccggctaatttttttttttttatatttttagtagagacggggtttcaccatgttagccaggatggtcttgatctcctgacctcgtgatctgcccaccttggcctcccaaagtgctgggattacaggtgtgagccaccacacccggcctagattattttaatgttgactcagtttctgctgggaaatatcttcttaaaagtgaaacatttgcattagattatagcttttttaaccttaaggctattttgatggttataggagagaaaagtatgtatggctagacagagagcaatagttctttttgtattaccattaatggtttgaacctaagctccttttaaaattaaattttgattataaacatttgggctttgaagtcccttttaagatcagggtccttatttattgtctcagagtttgtgttaattgttttactggaaaaaataagtagtcattgacattgaaaaaatttctacaggtttgaaatgctgttaagaagaaatagctacatcttattgataactactttttttgtttcgggttctgtagtgagtacattttaaacattttccatttcatattctaaataagtttgtgaggtaggttatactattccctttttatagttgaagaaattgaggcttatagaggttaaataactttaccagagtcacttggctagtaagtggaagggcttgagtttgaatccagatatgtgtgattacaatgcatgtgttcttattcataatggaacactgcctcctaatgcagtagtcaaaattattctattcccttgctgcttatcatactaaaaacttttcaatacttattgtttcctctaagcctttttcaatggaaagtctctaattttgctttatgctttgattgctgcttgtaagtgtaaccacagtgttgcttctgtattagtgttatcagtatttaaagtaagagaaatatttgattatttgcagctttgattgctttttcacaaacatgcaaatcacacatgtaatgttaagagtataattaatgccttttatgtgccagtgaatatactgaagacttgtaggttttctgaacaatattctcagaattggcaaacttgtagcttaagtcttgtaataaggatgctgtcttaggaaaataatttcaaaatacttgcactttagacctctcttggggaacacatgaagtaaggctgcttcctaagattctgctttgaggttttatgaagacacaatacatgctgttactggacagaagacattttagtttcatgacattgccaaatgtatctcgtaaaattcactgttcatgaatttaattaaaagttcttaggagcttaaaacttaaagtaggtattttagactcatgactcaaaggatcttctttcagtttgtgtgtgtgtgtgtgtgtgtgtgtgtcatacacacacacacacacacataaatatatatatttgaaggagttacagttctaaactaaactggaataaagtaatgcccatagttattaagtactaaagtacagtattttaaagaaatgttgaaattgttataatatgaagtttcttagtgcccctagcttacagccactaaagttagttttatatctgataccatattgtaatgaatttacttttttgttctgtatgatctttagcttagtttactgggttgcccaataacatgggattgacctgcctgctaaccttgtgttggagtctgcttagtccctagttcagctaggtccaagtttttgtctcatgaccaagaagaataaggcttgcagccactggagagtaaatagagtagaatttattaagcgaaaggaaagctcttagcaaagagaggggacctgaaagcaggttgccagaaataggactgagttctgggtcttttatgtggcaagagcaaggaagccttctgtgggttctgcccaaaatgggagggctaaagttccctcctaaggatgttgcatctgtgcatgcctggggttgactccatcttagttattacccgtgagtgcctaagcgaaagccacaggggtactaaaaccacaatgcgaatgtcatgttaatggcattataatgagttgggccaagttaaggacatttaggttgacttattgcgcctgygcctaagttgggatggtcccttctgagcaacatcctggcatgagggtaagttcttaatcatatttcttctcattagctacagggacagtgcaggtgcagtcctgtgggtatttttccactccgaagaccctccctctctatctgcctaaactgcctcctctgtcacttggaaatggcagtttactgttgaacaatagacctctccttatgcttttctcttccagtctttgggaatcacactctgaagattaaacatttcactgagacagcatgacgcagtagaaggtacccagaatcacaatacagttcacagtaacaaagatatggaatcaaccaaagtggatgattggatgaggaaartgtagtatatatacacaatggaatactattcagccataaaaagaatgaaataatgtcttttgcagcaacatggatcaaactggaggccattatcttatgtgaaataagctagacacaaaaagacaaataccacatataagtgggagtgaaataatgtgtacccatggatgtagagtgtggaatgatagacagtggagactgggaagggtgggagggggttggatgatgagaaattacttaattggtacaatgtatgttattccagtgatggatacctggaaagtcctgacttcatcactatgcaatatatccatgtaacaaaattacactgtatcccatacatttatataaatgaaatgaaaaatgaaagaaaataggagtttaagtaccatatgtgttacaactagctgtgcaatcctggacgagtcagttctcatttctgagcctcagtatccctatctgtagaaagtggctaaaagttgctacctcataaggcttaatattattactaataatattaatagatgaatagtaatatatttccgattactaaactttatagaggtttttataatttataagcactttcatatataataattttatagggatgtatatttatctatatttctgaaaggactttgtaaattctgaagcactacgtaacttgttagttgatagttccataaccagctaaatctgatttagtgactgtttttatccttagttatttgaacaatgaatcagaattttctaagctcagataatgcacttaactcaatttgttcagctaaaataaaagttttggaatgttttttaactagtgttaagatttgttttaaaattagattgtaacgacatctggcttttatattattatttaaagatgtagaaatggtgatgtagtaaaaatcatgagtggttagtagttgggggctagtgtcatttttaggagttgcagtgatgaactctatccactaaatttagtgatggatcagtgtagttcttttaaaataaatatttagtactttatgtttacagaggaccctgcaattattagttagcttataccaatatttattgctatataaagggctgggcaagtgcctataatggccacctttggagaggatttacaggcacctttgagaaaacttcttttttttttgaagatggagtcttgctctgtcacccaggctggagtgcagtggtgtgatctcggctcactgtgacctccacctcctggattcaggcaattctcttgcctaagcctcctgagtagctgggattacaggckcccaccaccatgccctttttaacagctaatttttgtatttttaggagagatagggtttcaccatgttgaccaggctggttttaaactcctgacctcaaatgatctgcccacctctgcctcccaaagtgctgggattacaggcgtgagccaccgcgcctggcctgagaaaacttctaactctgagtttagttggtttgtctgtatactgtcaggaatctgcaaagcttatttgatcgtttatttgtaccagcattttccctgagaagttattctgaaaaatactctctctcaaaatgataaaaaccttttctgtgcatttgtttcagaatcttaccgcttctaggacctagaacttctttctgaagtgtaacctaaatatttgccttaagaagttaaataactaatatttttagtgtaaccaccatttaaggcatttaaaaaaaatgaaatagtctgctttcaagactcttgtttctattatggatataaaacatatttttaaaaagatcaacattataaggtagtagatagtaagtattaattaggtgtttgtggcagatactgttagttgcctacccaaaacttatttccattttcaccttgttaatagaaccctaatcgtgttttggtagctgtgtgcccagcctcagttcatgacagtcatgttttctgatttcccaacttcttctacaactgaggatagccatgtgatcgagttctggacagtgttacctgtttagctctccattttttttctttccaacttttatttaaggttcagggggtacatgtgcaggtttgttatgtgggtaaattgcatgttgtgggggtttggtgttcagattatttcattacccaggtaataagcatagtacccagtaggtagtttttcagtgcataccctcctcccaccagccaccctcaagtaggcccccgtatctatggtttccttctttgtattcatgaggactcagtgttgagcttctacttacaagtgaggacatgcagtatttggttttctgttcctgcattaattagcctaggataatggcctccagctccatccatgttgctgcaaaggacatgatttattcttttttaatggctgcatagtatttcatggtatatatgtaccacattttctttatctcgttcaccgttagtgggcatttaggttgattccatgtctttgctattgtgaatagtgctgtgatggacatatgtgtgcttgtgtctttatggtagaatccttatattcctttggttatatacctagtagtaggattgctaggttgaacgatagttctaagttcttcgaaagattgccaaactactttccacaatggctaaacttattaacattcctaccaacagtgtataagcattcccttttctctgcaaccttgctagcatctattattttttgagtttttaataatagctattctgactggtgtgagatggtatctcattttgattttagtatacatttctctaatgattaggaatgttgactttttttttttttttttttgagatggagtcttgctctgttgccaggctggtgtgcagaggtgcgatctcggctcactgcaatctctgcctcccaggttcaagtgattctcctgcctcaggctcccacgtagctgctaagcatgccaccacacccagctaatttttgtatttttttcatatgccttttgattgtgtgtttgtcttcttttgagaaatgtctgtttatgtcctttgcccatttttaatggatctgtttgtttttacttgttaatttcytcaaattctctatagattctggatattagatctctgttaagatacatagtttgcaaatattttctccctttaggttatctgtttattctgtttatagtttcttttgttgtaacagatctctttcatttaactagatcctatttgtcagtttttttttttttcaattgcttttggagcctttgtcatgaaatctttgccatcacctatgtccagaatagtgtttcctaggttttcttctatggtttttgtagttttaagttttatatttaagtctttaggccatcttgagttggtttctgtatatggtaaaaggaaggaatctaatttcagtcttctgcatatggctagccagttatcccagcaccatttatttaatagagaattcagtaaatgctgctgggattacttgttttcataaactttatcaaagatcagatggttgtaggtatgtggctttatttctgggttttctaacctgttctgttgttctgtgtgtctgctttggaccagtaccatgctgttttggttactgtagtcttgtaatatactttgaagttgggtagtgtgatgcttctggctgtgttataatatttttgcttaggattgctttggcttttcaggttctatatgaattttagaataggtttttttccaattctgtgaaaaatgttggtagtttgatagaaatagcattgaatctgtaaattgctttgggcagtatagccattttaacaatattgattctttcaatccatgagcatggaatgtttttccatttgtttgtgtcatctctgacttctttcagcagtgttttgtaattcttgttgtagagatttttcacctccctggttagctgtgttcctaggtactttttttgtgtgtgtggctattgtgaataggattgcattattgatttgactctcagcttggctgttgttggtgtatagaaatgctactgatttttgtacattgattttgttttctgaaactttgctcaagtcatttatcagatctaggaacatttgggcagagattataaggctttctaggtataaaatcatatcacctgcaaagagagatttcctctcttcctgtctggatgccgtttatttctttatcttgtctaattgctctggctagaacttccagtataggagtggtaagtgtgggcatccttgccttgttccaggtctcaaggggaatgcttcaagcttttgattatttggtaggatattagctgtgggtttgtcatagatgagtcttcttattctgcggtatgtttcttcagtacctagtttattgagggtttttagcacaaaaggatgttgaattttattgaaagccttttctgtgtctgttgagttgatcatgtggtttttgtttttagttttgtttatgtgatgaaccacgtttattgatttgcatgttgagccaaccttgcatctcaggaataaagcctggttgattaggtagatgagctttttgatttgctgctggatttggtttgcttgtattttgttgaggatttttgcatctatgtttatcagggatattggcctgaagctttcttttttcattgtgtctctgccaagtattggtatcagcatgatcctggcctcatacagtgagttaggagggagtccttccttctggatttttgggaatagtttcagtaggattggtatcagcttatttttttacatcaggtgggctttggatttgaatcaatctggtccagggttttttctggctggtaggctttttattactgattcaatttcacaatttgttagttgtctgtttagggtttcaatttcttcctggttcaatcttgggttgttttatattttcaggaaattatccatttcttctaggttttttagtttgtgcacatagtgatatttgtaataatctctgagggttttgtgtatttctgtggggttgctggtaatgtcccctttgtgtgttgtgattgtgtttatttgaatattctctcttctttcccttccttccttccttctttctttctttttttcttttttgacgaaatttcagtcttgttgcccaggctggagtgcaatggcaccatctcagctcaccacaacctctgcctcctgggttcaagcgattctcctgcctcagcctcctgagtagctgggattacaggcatgtgctaccatacccggctaattttgtatttttagtaaagacagggtttctccatgttggtcaggctggtcttgaagtcccgacctgaggtgatctgcccatcttggcctcccaaagttctgggattacaggtgtgagccactgtgcctggccctggatcttctctcttttacttattagtctacctagtggtctatcaatcttattcatttttttcaaagggccagcttttggttttgttgatcttttgtatggtttttcgtgactcaatttcattcaattcagctctgatttcagttatttcttgtcttctgctagcttcggagttggtatgctcttgtttttttggtttctctaggtgtgatgttaggttgttaatttgagatttttctatgctttagttctctactgctgcttaatattttgttataaaatatagtaccttaaaacaacaattataatttattatatctcatggtttgtgtgggtgagtaattcagataaggacttgtttctgctccatgatgtctgaggcctcagctagaagactcaaagactgaggctggagtcatatgaaagcttgttcatgccattttttagttaatgcttgtacctgctgggggtccagctggaacattcacatgtggttttaatattatcactgggtttttttatgaccctgcctccggagttatttagcatcacttctgctgtactctattagacaagactgttaaaaatctcctcctagacttacagggagagaatatgtccccttctgtcagttggaggagcatgtatcatgttgtagaaagaaagtattaaacagaataaatatattgaggtggtcatctttagaaaatacagcttactacagcatttaagggaaggtttattgttggggggctgtggcgctgttgggcagtgatgttttaggcatgatcctttgttgcttattccttcttcatgcctcaaaggagcagcaaccatcttgtgcccataaggtgataaatcaaccgctaaggattttgacatcattggaagtcagtcctggatgatccatttccaggcttctttttttcctgtgtggaaaaaaatacctatttgtttaaattactatattaaggattttgttttttaaaaccaatcataatccccaaatgtcatggttgtcaactttgaggatacataggaatcacctgtggggcttgttaagatacagattgcttggccccatgttagagtttctgattcactaggtctggcataggctcaagaagctggatttgtaacaggctctctggtgttgtcaatgctgtggtcttgggactgaggtatgggctttgagacttcagagaagagtgggtggctagggctgaccttaagggaaaggtggaacttgggaaaaatagatgagatttagacaggattagggaagcaattccaagtattacaaatggtatcaacaaaaaacatgatagcagaaaaagtgtacttttttgttttttaggatttctgtgagtaaattagcttacttggagcaggagttttgtttttttttttttaactgaggatgggagattaggttaaagggaaaataaggactggattaaggtccttggaagccagagagacatttgtttttttattttgtagctagttaggaactgctagaagttttcatagagagtagtgtggccacagcagtatgctagcagacacctatgtttggtggtggtagtggagtgcatttagttattaaacaaatttaaacaaatggttcttgagcatttgtgatgtcttggactcagttctatgaactgggaatacaaaggtaaataagacgtggatcctgccatcaaagagcacggtctagtgcaggaattctcagagtgtgggtgagtacccctgggggtccctgagaccttttcaaggagaaaagrttaaaagtattttcataataatattaataattctaagaattctgagacactgtttacttttttgtcattctctttcattagtgtacaagtttttcagaggctttgtaacataggatgtcatcattgctcatatagctaatggaatacaagcttgtgtattaaaacttttgttttaatttcttaattataacttggtaaatactgatagacataaccccctaaacaaaagctctttggaatcttcagtaatttttttaagaggtagagtcgtgaagccataaagtttgaaaactgctgttccagagaatagattggaggagaaaacacatgaaaaacaaaagactaacactctagatgtgaggtaataagagcttaaactagagttataacaaatgaaaagtggaggaagagatattttgtagacactgaagagtggaaaaattgataatacctagtgtaaattatggtgtgggaaaacggatactgctagtgaacatgtaaattagtaccagccttttggaggaacaatttgacaaaacttattgcagactttaaaaatgaatctttcctgtgacttattctgtacttatcataaggaaacaaataagaatatatctttgcggttttgtttgtagtatcagtaaaaatttataagaagcctaagtatcagaggagtttgattaaataaattattacatcaattcaataaaatgctgtgtagtcactaaaaataatgatgtgggtgaatatttaatgtaaaaaattatatacttttttgttgttgttttgttttggattttttgagagagggtctctgttgcacaggctggagtagcgtagcacgaacatggctcactgcagccttcacctcctgggcttaagccagggactacaggcacacaccacacacctggctaacttttttaaaaaagttttttttaaagatgcggtctcaccatattgtccagactggtcttgaactcctgggctcaagccatcctcccatcttggccttccaaagtgttgggattacaggcatgagccaccacatgtggccaaaaaatactttttataaatacctcagttgcataatgttttctccattatcaacttgacaggcctttgtttaaggtttacggttataagtacttatttgtgtaaaatttaagatctatcaatatgtctaatttttcagaaatttttttcttcaacattttagcctttggcccattttcaaattgtatgtaggccaaggcatacacagtggacattgtgcagctgcgtatacgaatatagccaacattaagaggtcccttgcaataatgctgtttcagaaaggatgtttactgttcttttgaacatagttttcttgtttctgctttaacttataaatatttctcgggaggctgaggcaggagaatggcgtgaacccaggaggcggagcttgcagtgagccgagatcgcgccactgcactccagcctgggygacagagcgagactctgtctcaaaaaaaaaaaaaaaaaaaaaaaaaaaaaaaaaaaaatatttaaataaaaataatgtttcactgaagaaattgtaaaagtgaactatatgttaaaaataatctaggaaactaaattactgctattccactttgcagtttgatattgctcattttttgactcgtaaagtcagtgtcgatgccttttaactttttttttaaaattttactggatttgtattttaccatatttgtgcagtgactttgattaggtaccaattgaattcagattaaaaagcataaacctacatctgaagatagcctagtataatttatattgtgcatcgttctgattttgaaataataattctcctttacaacgttagggctgaataaaagatagaatccttatgaaatagtgagcccaatgtcattttttttttttttgagtcagagtcttgctctgttgcccagactgtagtgcagtggcacaatcttggctcactgcaacctccgcctcccaggttcaagcatttctcttgcctcagcctcctgagtagctgggaccacaggcatgctccaccacacccggctaatttttgtatatrtatttttagtaaagacgaggtgtcactgtgttggccaggctggtctcaaactcctggcctcaagtgatccacccatctgtgcctcccaaagttctaggattacagatgtgagccaccgtgcccagccccagtctcattttggaaatagagcagagacagatggaaaactgttagcccttggtgatgttattgagcagtgttatctgtgggtttccagatgtgttaatatatgtattttcttattaagtcctttgcattgaaatggtggtgcatggactggcagcattagcattacctatgagtttgttggaaatgaggaattttagactgtaccctagttcaattgaatcaaaatccattttaataggatccccagataagtcatatgcacacaaaagctggagaagtattattttacaccactttgagttggatttttatttactcgcaactggatgcatcctgatatgacattctggagttgttgtttgttttcttgtttgtttttcctgaagaggtacaaccttctccaggcatgctattgtgaatattggaggggtgccatttctgattataatagaaacagcatttgttgagtcatgatacagtttaaatagttctcattatactttgatatgatttttttcatttttttaaatggttatttttagatgaaacctaaaactgtactctttactacttgtggtaaaaaagaccctaccgttatttttggcaagtcaggagatgtaaccttagctgtgctggttaaaagccagctttgagagttgcattttacctcccttagaattactccttcccattctttcctcagctccattcctatttcaactagatagttttgtactggacctgtgttccagaaccattactgtctggggagcgactcttataaactactgccttttagaccagatgtgtgtttcagttacatgaatagagaaaagaatgtcatccccctgctatagctgtgtatatgatagcatgaagaaattaaatccaccagcaatctaggaattttcagaaaatttattttcttctactctttatacaaagccaggtgccacattccataaaaagcaaagcatattttaaaattgtacttcttgtttgtccatttatttagagggcttaattagtctgtagccagatattttggatgattcaattcacaaattagattatcgttctgtaattaactgagaatgatctctctgtggtgtgctttatagtgagaattaccaaaggtctgtattcactcggaaaggtcttagttttaaaagcagtctttttaaaggaaatgtagctatgctcattgattttgttattgttgtcctttgagtttttatggtacactaggcattatgctaggtatatgaaaatatgtctctaatccctgttttagacatgataacattgaggctagagagattatgtaacatgcagaaaattgtatagttatatgaacccacggctggtgctcccaaaactcattcatccccttgaggagttcagattctactgattgggagagaaagagctcactgtaatagaatgcaaaatgtagtaaaaattttaaatgaagtaaattgtaaaagtagagatacaaacaatttagtgagaacacagaggaagaagggattaactgtgattaggaggatcaggaaaacataatttatcttctctcctacttctctaagtttttttttttttttgagatggagtctcactctgttgcccaggctagagtgcagtggcgcgatctcggctcactgcaacctctgtctcccaggttcaagtgattctcctgcctcagcctcccaagtagctgggactacaggtgcctgccaccatgcccggctaatttttgtatttttagtggagactgggtttcaccatattggccaggctggtctcgaactcctgaccttgtaatctgcccgacttggcctcccaaagtgctgggattacaggcgtgagccactgcacccggccttacttctctaggtttttaagctcctcctgacttcttaatcttttaatagtatcgtaagtttttcagtaatcaagatttaaatctttgactgtttgtcttcatattcttacatttcatcaatctgtaatgccttttagttcttactgaaaacagtttcttggtagttatcccctaccatttccactgctgtcaccctagttttacctattgctgtatcatctaggccagtgattatcaacctttggtggacctaagaatcatctaatggtgctttgtcaaagtataaagagattttgacttattagtttaaggttatgggtgattcatcaaagttgagaaatacttatctagggcagtggtcttcaaaatgtgatcttgggactgctgggtgtctctgggactttatcaggtatctgcaaagttaaaactattttcgtagttagactaagatgtcatttacttttttcattgtgttgacatttgcactgatggtgaagaaaatagtgatggataaaacttgtagtgccttagctcaaattaagacagtggtaccaaattagtaatcaatgcattcttcactgccacataccagttttgcttaataatgtctttaatgaatcagttaaaatattattattaatttttttatttttaatttttgtgggtacatagtaggtatgtatatttatggggtatatgggatattttgatacaggcatacagtgtgtaataatcacatcaaggtaagtagggtatctgtcacctcaagcatttatcctttgtgttacaatctagttatactgttttagttatttttaaagtacaattaaattattattgactatagtcacctgttgtgctgtaaaattcactctttctatttttttgcacccataaaccatccccacttctctgccccactctccactactcttcccaacctctggtaaccatcattttactctttatctccatgagttcaatttttttttttttgagatggggcctcgctctttcacccaggctgaagtgcagtggcatgatctcggctcactgcaacctccgcctcccattttcaagcgattctcttgcctcagcctccagagtagctgggatattaggtgcataccaccacgcttggctaatttttgtatttttagtaaagacgaggtttcaccatattagccaggctggtcttgaactcctgacctcaagtgatccacccaccttgccctcccaaagtgttaggattataggtctgagcccctgtgcccggccaagtgttttaatttttagctcccataaataagtgagaacatgtgaagtttgtctttctgtgtccgacttattttacacaacacagtgaccttcagttccatccatgttgttgaaaatgacaagttctcattgtttccttatggatgaatagtattccattgagtatatgtaccacatttctttatccattcatctgctgatggatacttaggttgtttcttttctcttgttgcttttaagatctttttgtacttttttgccatgcataaatttttatgtagtaaaatatatttatattttcttttattatgtctaaattttagtcatagttggagagactttcattgcactgaggttagagaggaagacactcatgttttctgcaattatgcatatacagttgatcctcatttttttgtagacttggtgtttgtatgtttacctccttgtcagagtttatttgtaacacccaaattaatgatcttgttggtttcatggtcatttgcagacatgtgcagagcagtaaaatatggagtcaccaatgtgcatgttcccatctgaagctgaataaggtgatatctaccttcttgtttcagctgtcatattgtaaacaagtgttctttttgtcggggatgccacctcttccaaaacacatggtctgagagtgtggaggaatagttttccaaaagaaatagggtatatcaaatactacatgttctcacttctaagtgagagctaaacatcgggtattcatggacataaagatgggagcagtagacactggggaccattacagggggaagttagagggtgggcaagggttgaaaaactaactactgggtgccatgctcactatctgcatgatgggattatttgtattctaaacctcagcatcacgcaatatacccttgtaacaaacctgtgcatttatacccccaaatctaaaacaaaagttgaaattatgttttataaaagaaatggggtatgtttatcagaagaagggggggattaggtgtcagtcagaaacaactgtctactgtaatacctgagtaagcttttattggatagatttgaattggtgaatgaataaattgggtcttggagaaaggaaagggcttgaatgagttctttcagaataggccttttcttttctcaaaagtaccagcaatagcttcccattttttcagaactgatacctctagctttattggcttttatcatctttgctggagggaaatgacgttgggttaagtattgagtgtgaaggaagatagcatgaggatcttgtttgcctgcagctttattcctgcctgctagacctactgccctttaaagacacttgaaagggcttgccccagctttcctcttgactttagggggcaaaagtatgtcattcttatataagagttggatttataagattgtatatcaaattacatactcaagagttggattttgtttgttagtattgtctaaagttacaacatgtaaatagtctgtgtccttactttctaagcctgccattacaaaaagaaaataatatttcctattagagcctgaagcttttttcctccctagctcttatttagggagaatatataatttaagtgtttgaataggaatagaggaagtagccaaacacttttcaatagtccagctaaaatacacaatagcacatgtttaaagtacatctttggaagaaagatttgaagatccttgataagataatatatcatgtaccacaaaggcatgccctgctaagtaaaagtgggaagaagcagtacatattctattagggggtcagaaatctttaaatagaagtttctctggcaatctggttcccagatagatagttgaaggctcaaagaaatttccaagcttgctagaaatttccatctgctggcttttgtgttgagttaaatgccatcatattttattgcctcatacatttgcattaacactttccctttaaatttacttaaagtattttttgttttgtttcatttttgtttttttttgagactggtctcactttgtcgctcaggttggagtgtagtggagctcacagtttacttcagccttctgagtacctgggactacaggtgcatgccaccacacctggctaatttttgtattttttgtagagacggggtttcgccatgttgcccaggctggtctcgaactcctggcctcaagtgatcctccttgccttggccttccaaagtgctgggattgcagacgtgagccacagtgcctgacagtaatatttttttttttattagaaacataagaacccacctcaaagcttgggcttggaagtctatggaggctttatttattttagccacagacatggataagaggcaatctaagttaaatatgtgcactttggtaccaggccaacctgagttctaaccaaatttttcatgttttagatgtgagacaagttaatcttctaggccttacttccttcatgtataaagtagttattattacttaattcaacaaatattattagtcactcttctatgtgttggggtattccagtgaataaaataatgacagtctttcccttagtgcagtttccattctaatggtagaggacggaggatgggggaggcaataaaaaggaattgtatgttaaaaataataattgctgtaagcagagaggaagtagagcagggtaagggagatactgaatacagaagaaaggaggtgcagaattagggtagtaagggttggcatcgttgagccagtgacatctgagcaaagacttgaatgcagttttaaaaggcttgctctggtattgctgagttgagaatagattgcagggcattaagaataaaataaaggagaatcattaggagcttttcctagtaacctaggcaacagattttcttaggctgttcttgcgttgctataaaggaatacgtgagactgggtaatttataaagaaaagaggtttcattggctcatgattctgtaggctgtacaggaagcatggcaccagcatctgctcaacttccgcggaggcctcaggggagcttttacttatggtggatggcgaagtgggagcaggcccatcacatgacaaaagcaagagcaagagagagagtagagggtgaggtgcccaacacttttaaaccaccagatctcttgagaactcactagcgtgaagacagcagcgagccatgagggatctgcccctgtgacccaagcaccttccattaggccccatttcccatgttggggattaacattcaacatgagatttgggtgggagaatattcaaaccatatcacagatgatgataacttaacgagtattatcagtgaagatgctgaggaatcattgaattttgtatatatttttgagattgagacaacaggatttcctgacgatttgagtatgttatatgaaacaaaaaggagtctatgtttttggctcaggaactgaatggatggagctgttatcaactgataagaggaacactgtggacagagcagatttgagggggaagatcaggagttcagtactatatatatatatattgagtttgagatgtctgtttggcattcttgcagagataatgacatctaccaatgggttggttgtgatgattaaatatggtgaatgtaaattactgagcacagaatctgaccattatctctgtgagatcagagaataaattgctacatgaaacaagaataagagattgcaaaagggagatacttagggaaaaagagctcacagaatgtgatagaaaaaaatttttaaatgatggatgggaggataagattgaagaaatctcccagaatataaaagccaaagagatgtaagaatattacagaaatattaaaaataatggagaatctactcaggaggcccatctcctttctaaaaagattttcagagagagagagagatcaaagaaaagggaagggaaataattttatttatttatttttttgagatggagtctcactctgttgcccaggccagagtgcagtggcatgatcctggctcactgcaacctccacctccagggttcaagcaattcttctgcctcagcctcccgagtagctgggattgtgggcatgcaccatcacacccggctaatttttgtatttttagtagagacagggtttcaccatgttggccaggctagtctcaaactcctgacctcagttgattcatctgcctcggcctcccaaaatgctgggattacaggcatgagccactgtgctcagctaagggaaataattatcagtgaaacaatgcaagaaaaatttccagaactgaaggacatctgtttctaaattgaaagtgctcagcaccattaatgagggggaaaaagacatattaccaggacatttcagagtgccagagagtaaaaacaagtcacaaggaaaggaatagggattagtggagtgtcagacttaactcaaaactaacactggaagctagtagacaaggaagcaataccttcaaagtgctgagggaaaattatgacaaacatagatttctaattccaaccaaatagtcaatcaattatgaggatagcctaaagatatttttttagcatgcaaagtgccaaaaaatttatctcctacacatctccccacaggaagctattgaagtatgtgaaagaaggcatgaaatctaggaaaatggggaatgtaacactggagagagagaggaagtttgcaagatgatggtgaacaaaagtccaggatgacagctgagtagcaagcctagagatgactagtacagattggagcaggaaggtggaaactccagggaagatgtctgtacaaaccaaattaaactgatgcatgtgattattctgaaagagtttcatagtttgttcagacattagggaataaactgtccctaacttaagggagcttacactgtaataaggggtacatgcaagtaggcaggcaattatagtattctgtgaaggttcgtaaagtttagtactgtaggaaaccagaatatgcctccccaaaatgtgaaggattctcgagctgaagacagttaagatgcagtagagctctctgcctaaaagcaggacacagatttacagagaaaaatgtcttgctgtcctccctcctccctttctcccctaaagacaggatgtaaattctttactggaaaaaaaccctttatcatctcagagacggcgccagaggaatctgcaagctgactttactccattagtgccttccatatatttacctttccacggtttcccacctctggaagtctgggactgctttcctttgccttgtcacttctctaaaatttattgttctttgttggatatactatataaaccagactcatgaaccactgccttgagttacttttcactgagggcttttcctgtgtgatatgcaccgtacacgttaataaacctatctgtttttctcttgttaatctgccttctgttatagaagtctgtgctaactacatacttaagaaggttgaggaaaaaatactttttctccccttcagttctctgctgctagatcacccatagttggaatggaggctcagaaacctagtatttagctcctttgagcatctgtaattgaactggcaaascaagagcttggggctgactgttggattagctgaagaatagtttccgtcatattctagaaaagaaagctttttttttctttttctttttctccagggaatgagtggggttatccatttattgtagtttaaaggatttaaaatccatctatatattgataagcattcatcagtttttattttagtatgtatggtgctatcatgtttataagaatattttgtttttaaaatgactagagcggtacaaaggaaaaaactttagttgttaattttagatgaaaagcaactgaatttcttaggtaataattattttaccctcccaagatacgttttctgtactccattgacttatgccaataaagtaatgttcttccaatttaataatggattttttttcttgttgaatttttttcaactctaacgttattttgttgttggagattgattaaaaaatacaaattttactgtttaaagaatgttgcctaattagttataaatctatttcatctttgcatttttttcttttatatactcatataaaatgtagcagtttgtatcacatcagtatttctcttatataaatatggtttatggttatgtctaatctcatttctcatttggccagttaatatatgcacagataaatggcccataaagaaaaacttcaagaggagaaaaaggtaatctaaatgcatattattattttaaagttctaatactgtgtacaattttatgaagttaagtttctrtaatatgtggtcacccaggggtctgagaacattagttaatccagtcaacaaacattgatggcatatgtgctgtatgacaggctctgtgcttggtcttaggaatacaggacaagttagggcatcattcccaccctccgataatgcttagtccccaggaaaaaaaaattgacatataaacaagtagaggtggtaaaacagaagattaaaggtcctatagatgatatttaccaatgaataaagagagaaggctatcttaagaaaaatatgtagtaagaagaaagaaatggagatagagaacatttgaggaaatggcagacatttatttgtatttggttgtagcatagagtaatggggaagaccggggaaacattgagaaccatctcatagagcaggcatgctacatgctggagtttagtcagtttctcctggaacagtatttctcaaatatgtgtgatcatatgaatcactgagaaagtttgtaaacaaacaaaaacaaccctaacagattcctgaatttcactccagacctggaaaatcagagtccttagaggagggctaggaatccgtattttgttatgtcatgtcatgtcagacagggtatctctgttgtccaggctggagttcagtggtacagtcatagcttactgcagccctgaactcctgggctcaagtgatcctcctgcctcagcctccagagtagctgagattacaggcatgagccactgtgcctggtggaatctatatttttaacaagagctctggtaattattattgtaaccaatttattgaacaagtacaagctattagggtataagcaaatatttttccctcaaatgttctagttgatgtgagactttcctttggcatgtattaatgaaagcaaggacataacccacaaatttcctatgtgcatgtacatatgtgcacatcacacacacacacacacacacacacacacacacacacacacacacacacacacacattttgtggttactaaacagtctaggccaggataaaatttagggaattacagcaggtcctcaaataatgttgttttggtataacattgatgactgaaaaaacaaaaaacaaaaatcccagttcccaactggtgccactctctctgtggaatttgcacattctccccatgtttgcatgggttttctcctggtacttcagtttcctcccctgtcccaaagatgtgtgcattgggtgaattagcgtggcccctgtttgagtgtttatgggtgtgtgtgtgttagtgtgctctgcgatgggatggcatcccctccgtggtcagttcctgccgtgtgctctgactaccaggataggctttgctttcagaaatctccagataattagcttcatatatttctgtgttcaggtgctttcagtttctgcagctcagcaagcgtccagctttggatcaagttgccagtgtgtccttcttgcagatatcttcaccttgcaatctgtatgaccaattattttgaagtgccaacttaatgaatgacccttcgtggtgccagactcctaagctctcccttgccttctcttagttctctctttggtagagttggttgaatgcaccagtgagtttgttacttctcagcaaaccttgggggagatatctgaacctaattgttggtgttctcccttagatttgggctttattgcctcttgcwgtcagctttgggccctagttactgattctggaaaaagtggaaaaataccccttaacatcttgttagattatgaataggtaagtttaggaaatattattgcaggtagaagaaaacctaacaggtttttattttctaatgtttaaagagacatttaagtaaaagatctcaatggaattatacctttctttttgttgttgttgttgcagatagtatgtacttaatttttttttttttttaaatttcaataggtttttcaggaagaggtggtgtttggttacatggataagttccttagtggttatttctgagattttggtgcacccatcacccaagcagtgtacactgtacccaatatgtagtcttttttttttttttttctttttgagatagagtcttgctctgtcgcgcggcctggagtgcagtggcatgatctgggctcactacaacctccacctcccgggttcaagcgattctcctgcctcagcctcccaagtagctgggattataggcgcctgccaccacgcctggctaatttttgtatttttagtagagacgaggtttcgccatgttggcaggctggtctcaagctcctgacctcaggtgatccacctacctcagcctctcaaagtgctgggattacaggcatgggccactgcgcccagccgtaatatgtggtcttttttacctcacctgcctcctgcccttccccttaagtccccacagttcattttatcattcttatgcctctgagtcctcatagcttagctcccacctgtaagtaagaacatacaacgtttggttttccattcctgagttactttgcttagagtaacggtctccagttccatctaggttgctgtgaatgccattgtttcatttgtttttacagctgagtagtattccacagtgtgtatggggtgtgtgtgtgtgtatatatatatatcacaatttctttctttctttttctttttcttttttttttttttttttgagatggagtttcactcttgttgcccaggctggaatgcaatggtgcgatctcggcttaccacaacctctgcctcccgggttcaaggaattctcctgcctcagcctcccaagtagctgggattacagtcatgtgccaccacgcctggctaattttgtatttttagtagagacggggtttctccatgttgttcaggctggtcttgaactcccgacctcaggtgatccgcccacctcagcctcccaaattgctgggattacaggcatgagccactgcgaccagcagtatatcacattttctttatccactcgttattgatgggcatttgggctggtttcatatttttgcaattgcaaattgtgctgctgtaaacgtgtgtgtaagtgtctttttcatgtaatgacttcttttcctctggttagatacccagtagtgggattgctggatcaaatggtagatctacttttagttctttaaggaatctccacattgttttccatagaggttgtactagtttacatttgcaccagcgtgtaaaagtgttcccttttcaccatattcatgccaatatctattatactttgatttttaaattatggccattcttgcaggagtaaggtggtatcacattgtggtttggatttgcatttccctgattattagtgatgttgagcattttttcatatgcttgtcggccatttgtatatcttcttttgagaattgcttattcatgtctttagcccacttttttgatgggattatttgtttttttcttgctgatttgtttgatttccttgtagattctggatattagtcctttgtcggatgcatagtttgctaatattttctcctattttatgggttgtctgttcactctgctgattatttcttttgctgtgcagaggctttttagtttaattacgtcccatctatttatccttgttttagttgcgtttatttttgggttcttggtcatgaaaactttgcttaagccaatgtctagaaggggttttccaatgttatctgctagaatttttatgttcaggtcttagatttaagtctttgatccattttgacctgatttttgtataaagtgtgtcttagtccatttttacgctgctggtaaagagatacccgagactgggcaatttacaaaataaagaggtttaattggacttatagttccacatggctggggaagccgcacaatcatggcagaaggcaaggaagagcaagtcatgtcttacatggaatggcagcaggcaaagastttgtgcagagaaactcccgttcttaaaaccatcagatctcgtgagactcattcactatcatgagaacagcacaggaaatatccacccctgtaattcagtcacctcccactgggtctctgtcacaacacgtgggaattcaagatgaaatttggtggggacacagcaaaactgtatcattccacccctggagcctcccaaatctcatatcctcacatttcaaaaccaatcatgccttcccaaaagtcccccaaagtctcaactcatttcagcattaactcaaaagttcacagtccagcgtctcatcagagacaaggccagtcccttccgcctgtgagcctgtaaaatcaaaagcaagttagttacttcctacatacagtgggatacaggcattgggtaaatacagccattccaaatgggagaaattggccaaaacaaaggggctccaggccccatgcaagtcaaaaatcaagcagggcagtcaaatcttaaagctccaaaatgatctcctttgactccatatctgacatccaggtcatgctgatgcaagaagtgggttcccatggtcttgggcagctatgcctctgtggctttgcagggtacagcccccctcctagctgccttcatgggctggcattgagtgtctgcagcttttctaggtgaatggtgcaagctgttggtggatttaccattcttcttttttttttgagacagagtctcgctctgtcaccaggctggagtgcagtggcgtgtgatctcggctcactgtaccctctgcctcctgagttcaagcaattctcctgcctcagcctcccgagtagccgggactacaggtgcctgccaccacgtctggctaatttttgtatttttagtagagacggggtttcaccatattggccaggttggtctcgaactcctgaccttgtgatctgcctgcctcagcctcccaaagtgctgggattacaggcatgagctactgtgcttgacctggatctaccattctggggtctggaggatggtggccatcttctcacagctacactaggctctgctccccagtagggactctgtatgggggctctgactccacatttcctttctgcagaggttcttctccataagagtcctacccctgcatcaaacttctgcctgggcatccagatgtttccaaacatcttctgaaatctaggcggaggttcccaaaccccaattcttgacttctgtgcactggcaggcttaacactgcatggaagctgccaaggcttgcggcttgcaccctctgaagccttggcttgatctctcattggctcctttcagccatggctggagtggctggaatgcagggcaccaagaccctgggctgcacacagcctgggccgcacacagcacagggaccctgggcccagcccatgaaaccactttttcctcctaggcctcctggcctgcggtaggaggggctcccatgaagacctctgacatgccttagagacattttttccattgtcttggggattaacatttggccccttattacttatgcaactttctgcagccagcttggatttctcctcagaaaatggattttcttttctatcgcattgccaggctgcacattttctaaacttttatattctgcttcccttataaaactgaatgcctttaacagcacccaagtcacctcttgaatactttgctgcttagaaattttttacaccagatacccaaaatcatctctcttaagttcaaagttccacaaatctctagggcaggggcaaaatgctgccagtctgtttgctaaaacatagcaagagtcacctttactccagttaacaagttcgtcatctttatctgagaccacctcagcctggaccttattgctcatgtcactgtcaacatttttgtcaaagccattcaacaagtccttttttctcttttaaaatagacagatcatgccagtgttgaagggatatgtttccttttttttttttttttttttttttgagactgagtcttggtctgtcgccacactggagtgcagtggtgtgatcttggctcactgcagcctccgcctcctgggttcaagcgattctcctgcctcagcctcccaagtagctgggacaacaggcgtgcgccaccacacccagctaatttttgtgtttttagtaggggtggggtttcatcatgttggccaggctggtctcgaactcccaactttgtgatctgcctgcctcggcctcccagagtgctggaattacagacgtgagccaccacgcctggcggagatatgttttcttaacactgggcaaagaatctcagtttatatagctcactggacaatttacagatcctgaggtcagggataatagtaagtatggattgtgaaaaccttcagtaactcatagattttagccaatgatatgttacaaagtattttatactgtgatattatttcctatgagtcatcccattcctgttatttaagcagtgctcaagatcactatggttcatatccatgaatgtatttcagggtagaataattcttgaatcttatttataagatatactgttgactttaaatgaaagctactcatttaaataggacaccttatataccttggatatggatatttgtttttttctctttaattgtcatattttatatatttatggggttcatgtgagagtttgctgcatgcatagaatgtgtaatgatcaagtctccatcatcatgagtgcttatcatttttatgtggtrtcatttcaagtcctctcttctagttactctgacatatacataatattgttactaagtgtagtcactgtggtctgctatcaaacattagatcttgtttcttctatctaactatgtgtttgtacccacaaccaacttctcctgtcctctccccttgaaccacccttccgagtctctggttatctgttgatctattctctatgtccatgagatgaagttttttagctcccacatgtgaatgagaacrtgtggtatttgtctttctgtgctgggcttattttgcgtaacataatgacgtccaattccatccatgtcacttcaaatgacatgatttcattcttttttatggctgaatagtatttcattgtakgtgtgtgtgtgtgtgtgwgtgtgtgtattatataatatattcattgtgtgtgtgtatatattatatatatacacatatataatgtgtgtgtcttttatggttccatacaaattttaggattttttgtctatttctgggaaaaaatgaatcccacttgatcatggtatgttatcttttgggtgtgctgttggatctagtttggtagtattttgttgaagacttttccatttatcttcatcagggttattggtctgtattttttttgttgtagctttgtctggttttggtatcagggtaatgctggcctcatagaatgagttagggagaatttccttctcttaactttttggaatagcttgaggaggactgatatgagtttttctttatacatttggtagaattcagcagtgactttattcagtactgggctttttttcttgagagactttttgttcctggttcaatcttgatactcattatgttcaggttttctatttttcctgattcaatcttgttggattgtattgatatggctccaatgaatggaggaacaccagtgtccttggtcttgcgctgatttagataaaatgacatggacacatgtggagtgattttaaggagcggagagtttaataggcaagaaagaaggaagaagctcccccatacagagacagagggaggggggctctgagagagaaaccatgtgtgcggtggcaaagtagttagttatattagcaggctggaggaggcggtgtctgatttgcatacagcccagggattggttttaccagatgtgtcattcatgtggcccgtgaaaaacctggccctcccaccttcgtcctttaatatgaaaatgcgggtcaccatgatgtcctgaacacgtgtgagttatctggaggcggccatgacacttggtacttgtggtgacaaggagaagagggcagcaatcgccatgttggccatgttgggtggacctagtttctaatcgccagaatttgcatatcaaagcttgccgtctttaagccgccttttctgttagaaaagaaatggtttgggggttgcttcttacaggaaaatttccaccgagaacctttaccctttctacctgcctaaaaattatttcttaataactcctatattaatgtgtttccaggaatttctccattttctctaggtttttcactttgctagcatataattcataatagtctctgatgatcttttgtacttctggtgtcagctgcaatgtctcctttttcatttctgagtttgtttatttgggacgtctcttcttttttcggttagtcaaggtagcggtttatcaattttgtttatcttttccaatgatcaacgttttgtattgtatttttagtctctatttcatttagttctgctctgatctttattatttcttttcttctgctaatttttggttttctttgttcttgctttttagttttttgaggtgcatggttagattgttcatttgaaatctttctgtttttctgatttaggtgtttattgctataaactcccctcttaacatacttttgctatgtcccacaggttttggtatgttgtgtttccattttctttgtttcaagaaattaaaaaaattttttatcttgattctttcattgacccagtggtcactcaggagcatgttgtttaatttccatgtatttgtatagttttcagagttcctcttggcattgatttctagttttattccattgtgatctaagatacttgatatgattttagctttggaaagattagttttatagcctaacatatggtaaatcctggagaattttctatgtgcagatgagaaaaatgtatattctacagatgttagataacattttctgtacatgtctgttaggtccatttggtctaaagtcccgtttaagtctgatgtttctttattttctgtctagatgatctcttaaatgctgagattgggatgttgaagtaccccactattattgtattagagcctgtctttttctttagatctagtaatacttgctttatgcatatcctcttgctggattgatccctttatcattatataatgaccttgtctttctgtgtcttttttttttgtgtttttttgttttttttaagaaatggggtctcaatatgttttctaggctagtcttgagctcctggcctcaagtgatcctcccgcctctgccttctgagtagctgggattacaggcaggagccatcgtgcccagcttctttgtcttttattattatttttgacttaatgtctgttttatctgatataagtgtaggtatttctgctcacttttggtttccgtttgtgtggaatatcttttttcatttatttactttgagtctatatgtgtcttcacaggtaaagtgcactgattgtaggcagcatatagttagatcatttttaaatcaattcagagagtctgtatcttttaagtggagaatttaatccattaatattcaaggttattattgaggttttgttccttcatattgttaattgtttgctggttttctatggtggtatcacttgaattttttggctttttcacttgtgtattgctttaccagttagttttatatttttgtgtgtatactttgtgtgtgtgtgtgttttttttttccactcccttgagcatttcttgaagagctagtctagtggtgatgaatttcatctgcttttgcttgcttagaaaagactttatttcttctttatttatgaaggataattttgctggatatagtatccttgggtggcagtttttttcttttggcactttgaatatataaccccattctctcctagcctgtgaggtttttgctgagaagtctcctgttgatgtaggctcctttgtaggtgactagacattttcctcttgctgctttaagacttttctccttgtcattgactttatgcagcttgaatacaatgtgtcatggagaagacctttcgcattggatcactggtcttcctgtacctggatgtctaaatctcttggtagacttgggaaaatttcatctagtatttcattaaataggtttttgagcatttttgttctctgtttccctttgaggatactgataatttatatatttgattgctttatggtttcccatatatcatgacgactttgttcattcttttttattctttattcaattttttttttggtctgcctgggttatttcttttttttttttcttttttttgagacggagtctcgctctgttgcccaggttggagtgcagtggtgcgatctcagctcactgcaagctccgccgcctgcattcatgccattctcctgcctcagcctcccaagtagctgggactacaggagcctgccaccacgcctggctaatttttttgtatttttattagagacagggtttcaccgtgttagccaggatggtctcaatcgcctgacctcgtgatccgcctgccttggcctcccaaagtgctgggattacaggcgtgagccaccgcgtcctgcctggctgggttatttcaaaaggcccatcttcaggttctgagactctttcttttgcttggtttagtctattgttgatgcttttgagtgtactttgtattttttcaaggacttcttcagttccaaaattttggtttgtttcttttttattctatcactgtggtaaactgctcctttatttcctgaattgtttttctgatttctttgtattgttttttgaaattctcttgtatctcattgggcttctttagtatcataattttgaattctttttctgggatttctttttttttttttttttttgagacagagttttgctcttgttgcccaggctggagggcaatggcacaacctcagctcactgcaacctctgcctcccgggttcaagcaattctcctgcctcagcctcctgagtagctgggattacaggtgcccaccaccacgcctggctaattttttgtatttttagtagagatgggtttcaccatgttggccaggctggtctcgacctcttgacctcaggtgatccatctgccttggcctcccaaagtgctgggattataggcgtgaatcacagtgcccggcccagcatttcttgaatttctttttattgggatgtgttgctggagaattattatgttcctttggaggtgtcatagttctttgctttttcatgttttctatatccttgtgttgacatctgcacacctggtataatagttgcttcttcaaattttttatttttttatttttaacttttcttcaacttttgttttagattctaggggtacatgttcaggtttgttacaaagttatattatgtgatgctggagtttggagtacaattgaacatgtcacccaggaagtgagcacagtattcaataagtagttttcaatctttgtcttcctccctccctcctacctcatgtattttccagcatctgttgttcccatctttatgtccatgtgtacccartgtttagctcctgcttttggattttctttcataggagatgtatcaatggtgctagttgggtgggctctttggctttgattctgggtgcattcagttgtgtagtctctgtattatttctttagctataaacaatatctgtgttatctgtgatttcctccatggtttatggtgtggttattagtggagcttatagtgaagtttggtgggacagggatgctaggcaggccactttttgggccctattggtggtagcggtgggctgatcatacttgttcttaggccccagsacagtgtgcagtggcactagttttagtgggaccaagaggttcaattcttggctccccaggtggcttgctcagatgctgaggtggtggtggcagaggtggggtgggcaggtgagcaagttctcatgtccctgggaatttggtatggtgtgggtagtggcagcagcagtgaggagaagaccctctgggtcccaagcagtatgtgctaatgttgatggtggctgtgatgcagggtcactatccacagccccagacacacagctcttagacttgtccactcttggcagcaacagtactgtactgctatgccaaggaggggaggggccccatgttcacgtatgagtctaagcatggaggccacaccaccagtgggggcacagttactacttacagccccagacaggcagctcctccggcttgtccaccctggcccctggcaatagcagcagtggcagcggctgtagtggtgtgcagaggaggagagaggctcctgttgtatatgtgtaaacctgagcacagagaccactccattggtgcaggcagggtcactgcttccagctccagacagctattatgcttacccatctgggttcctagtgacagctactgctatggcaatatgcagagaaggggaggagatctttccacttgtgagcttgagcacagaatttgtgctgcctttccggtagaatgcacctttggtacactgtaactttttggtacactgcaccattccctgaggagtagtgttttccatgggctagaatactggggaccctggagcacctttgggtccagccagtgctatgctgctgtagccatttgagtcaacactggggttgttagtgggagatcccagaatgtggagatatggggcctctgatttccaggtcaggatgcagtcctatgacagctgtgctctcacagtagtgctctgcagtagcagcttaggccttgggggtgtgactgacccagcatgagttccttgtctggtgcaatgcccttgtgggtctccagatcaccacccttgctagtatcagggtttgtgtgggtagaggagctctcccatggtttggattgctgcagtccacagtggggacatggattgttaaggttctctcacttacccttccctatgataatgagtcccttggggctcatagctgatcttggctgagttggtcacttgcttccttctccttctttgcctcaggtgtttcctgtgactagatcctgttggacactagtgttctcttctagatgttctattwkaggtgtgattattttggttatatattagtaattttggttctttctggagagggtgagtgtccaatctctctagttagccaccttgaatacatctctgctgaggagttcaggaagagcagaagctacctctatgctcctgctgagtcaggcaatgcctatacctttaattctaccagaattgaagtaacaaatttgtctactttagggcaatamataaagtcaatatacacctgactacaaagcttcgtagactatcaacatcagttacttctgacagcttggttgtagatgtgaaaggaaatgggttcattgtatctgatgctgccgttagaccaagctggcaccacagaagacctggaatttgttaatactgcttaactttcatgtttcctggtacaatcaggatgaagggaactgtaaccactaggtggcatcttttaattagaaaactgtgaatactccattgctcactaggatccttgtggcctacttagcaaagcaattgcctgtgagagcagctggtggcagtctttaagatgcagatttcaaataggagagaaaggaagagataaagataaaaagagaggaaagaagtgggagggcaagagaagagaaaaggagaaagtaaacaggcgtactgtgaaggaagtagtaaaatgccatcagtaattagctcaggaaagtggtatttatggcatttgttgcttaccattgtttcatttctttatttatttgacacgtatttaatgggaattaggaattctggctgaggatacgagatgctgtttctaccctcagagagttgatagctaaagggagtttaaaatatctcaacttaaaatcttgacccccttcctgtagagtatgttaaataatacatgaaataataccttttatttttagttttatttgtttcgtattctctatttcattcccctatcagagaaaagagtttctggagtactctagttgacatactttgaaaattagccccttgagggcagggagtgtatattattgaggaatctggagcatgttgttccatccctgactcttattgatgggggggaatgtccatacgttgaacgaatggtaggatcagatgagaaacctcagcaaggtgtctcctggttatagtctacagccttcctggctctttgtagaatttaggcttctgactttgaatgctttcctgacagcaccatactctcctctgctatatagcacactatcatattgcctgtttacgaggcatttgtgtttctccacagtgatgaattcttttatggtagggtctgtttctaatttaatttatttatgtagtttcagtgtttagcaggtggtgagtgctcaataaattttggttaaatgaatgaataaatctgactaattatagtgtacttggtataagataaatttgtataggaatccttttggagagagttaatttttggatatgccagaaagaccatcctttaasattttttttacatatgtgaggatgattaggcaattactttgagtgtaagatatggtgcactttcaaagataaccagaagatataccagttgtatgctagagatggatttgtagtgccaattctacaaatacaactcttaaaaaagtttttttttcagagacagtcttgctctcttgcccaaatgggagttcaatggctcgattatagctcactgcagctttcacctcctggggttgggtgattttcctgcctcagcatcccatgtagctaggactacaggcacataccatcaggccatgctgattttaaaatttttttgtagagatggggatcttgctgtgttgcccaggctagttataaatccctggcctcaagggatcctcctgctttggcctcccaaagtgttgggattagaagtgtgagccactgcccctggccaactcttttaaattttaaagtggattctgttgcgttgtcttagataagtagcccagctgcagtcttcttgtttcttttttctaaaataataggcactgatgacatctattatttgctccttcaggatctagggcctgccgaggacttcatcttataaagatgagtatgagaactgagacaaggtcaagtagagtagtaaaaggtgggcagagagggatttcactatggcggaattctattataccagaggataatgtcagtaggccaacgtctgtttgttgaatgccagaactttcatattcaagaatatatattagaaaatagatgtcattttattaatagacctttttagaaaggtctatcttataaaggacacattataaaaagccttcaaaaaacaaaaattttaacagctttttgagatataatttacataccatacaattcacccttttaaggtacacaatatagggttctttttttagcatattgacagattgtgcaacgatcaccacagtctaattccaaaacatttcaccaccccaagaagaaaccctgtacccagtagcagccactctctcactctgcatttccaccttccccaagcccttggaaatctctatttgctatctctatagatttgcctgttatggacatttcatgaaaktggagtcatataatgtgtgttcttttgtgactggcttctttcatatagcataaagttttcaaaattagtgttgcagcatgttatcagtattcttcattccttttcattgccaaataatatactgttgtatagatagaactcattttgtttatccatttatcagttgatggacatttggtttattttcacattttgggtattatgaataatgcagtaataagcatccatgtacaagcttttgtttggacatatgtttttatttctcttggttatatccccaggagtagaattgctggatcatatggcagctctgtgtttaataatttgaggaactgtgaagccacttttccaaagtcctaccagcagcgagctagggttccagtttctccacatcctcactaatacttgtcatctttttcttaaaaattacaataatccttgtagtgcttgtgaagtggttatgtcattgtggtttttgtttgcattttctaatggctgatgatgttgagaattttcaagtgtttattgaccatttgtatatctcttttggagaaagtctatttaaatctcttgcccagttgtaattgggttgtctttttattattgtattttaaagtgctcattttatatgttggatacaagacccttaatagatatttgattttcaaatattttctcccattctgtccttttactttcttgatggtcttacttgtagcagaaatatgttatatacacatatatgtaaatgtaatatttatagcataatgaaataaagtagtttagaaggatttgcagtagggtgccatgaaggggataacagttgtcttttattgaaattcaaagctgagccctaaatccatatgtaatacaattatgggaagccaaaaaagaacagaagctgctcagagtgaaacataatgtcctacagcacatgacacaccttcttcctgtctttgtgatatcccagttacaagctagttagagaaatgatagggattggggtagtgagaaaagaatagttgtttcctttggtgtctcaggtaagatatactgttagagatatagctagaaataaaaccaaccggttctagcagagatgacgataattctacttttgtcaaatcaccaccagagaaatctcctctcagttgattaacatcatgtgccgcaggctgtttctttcttttactctaggtatagtgggagtaacccattggcaagaaaaactcatatttaggtggtaaggggaaggcaggtagagaaaatgaagtgtgtctttgacacagtatgaatggaggtgctccccattaggaattgagcaggtagactgtgttgatgaacatagagtaacacgctgggatggttgtggccacttgtctgtctcattggtccatctctcccagtattccatttgaaatccttcttcagccccttaccacagcttcaggttgatattgaaatacaatggtaatagtgagggtattttaaaagtggactttaaagctgagttacattaagaaatgggcatatctggcaagttacaggcacaggtaagtaacttttttttttctttttttgcattaggggtttgaaatagtgcaccgatggccttctgagaaaggtgtctaccttctcaaggtttttctatagaatgacttatcaaaatccatatggattcttgaccgaggcttttcagctggattatgtgaaaagctgtggattttgtaaagaagcctggcatgtgctccagtgtgtttcagtttttaaattttcattttttacagtgtgagaactaattccagactaataacatttatgtgaatagttctctaagctttgcttcctaaagtgtaactgttaagccttctggaataacaatgcagttctcccttcagaaagattctttatgttgatgtcttgtgactggcttaaattcttcaggcactttctctcctggttcctctccacacccagagagagattttagataatcttgtgcattgagcagaatcaagagatgagtcaggaaagttttctaacaaataatacttttgacggagccatacaacttaatttcgattttgaagtgacagtaattgtcagtattgctccttcaagtggagggactaatttgtaatcatgagcatattgcataatggcgacataattgagggcgtaggcctatcctttagaacatagcccccaagagaattgtgttccatacataatataaagatatgttaaggtggttgtgaaactccttgctgtgaaatagtaggggcttctcagtcattttgtgtatagtttgctttgtagatgatgctgtatttcagtagaaaacagttgatgtctcaatgtcatattggcatctgtggttgagaatagctcaaatactattgaattaaacttgtgtgcgtgacagtgtgcttgcccagacggactccttagcactgtatgactcttgagaaaatggtctcacttgacaatttcattgctacctaagatttttatttagtggctgaggaagtgaagtagtgacttatactgatttgccatctagggagataattggtaaacttgggcctgagaaaggaagagatctgttatgtaagaaaaatactgatcaaaagaacaatatttgttgttgttgttgaccagctctgactgtgaaacatttaaagtgtctgggctctaatttgagagactagttgaaaaataatcatttgacatttagcactctgctaggtaccgggaaattagagcaagtaagaaataatttcatatcttgaggtacttatattagggggaagacagacatacaggcagatatttttttctgatatattagataaaggctttactcttccccgcccctgcccccctccatgtggaaacacatacaaacaggagcaaaaaagggaataccaaattcattttaaatacatgtagatacccaatatgtaatatgtgtcatcttactctaggatgtgagctttaaaaaggtggaagccaaattgtgcatgcttttgtatagatccttgcataaactagatagtatatagaaaattgacagtagtaagtgaaatgcttgattccttttaagaaagaaaattccaagagttatgttaagaacttctttaaaaaaaggcaagagtgaaaaaaatgcacaattcagaatagtgatgatcattgcagggaggcaggtagatggctttcggtaggggcccatgtatagcttcactgggattgtgtttttagttagcttgggctgctgtagcaaattaccatagattaggtagctcaaataacaaacatttatttctcacagttctgaaggctggaagtctgagatcagggtggaagcatggttgggtgccctcttcctaattatgtcttcacatggctgttcccatcacagggactccagcttcaagacttaatcgaaccctaattacctccctaaaggccctaggtctaaataccattacattggggattagggttttaatacattaattttgggaggacacaaacatttagtccatagcagattggaaatattttaattcataaattaggtgctgggttcattaggtatatattctgtaattatgcctcataacatacattatatatatataaaaaaataaaaagtatatatataaaactgtaacatttgatagatgcatatatatatatatatatatatatatatatatwtatatttttttttttttttttttttttttttttttgagatggaatctcactctgttgcccagcctggagtgcaatggcgtgatctcagctcactgcaacctctgcctcccaggttcaagctattctcgtgtctcagcctcccaagtagctgggatcacaggtgcctgccactgcacctggctaatttttgtatttttagtagagatggggtttcgccatgttggtcaggttggtcttgaactcctgacctcaggtgatccaccacctgccttggcctcccaaaagtgctgggattacaggcgtgagccaccgcacccagccttcccagtctgaatttcttaaaagcttttgcttaggttaagttgtgggagaaaaactgaactcacccagctagccaaactatctctctgttgtctttccactttatccatctattttttactttttttggaaacacaataacaatagtgtagaagtcttttcacattgcctgactctcctgtttgtgtcccataaggttccatgtactctgtccagaactcagcttattatgtcaaaggattctgtctggactggtcagtcagagatataagttctcattacctcagtgtgtgtgtttgtatctgtatttaatgatgtttgtgcttggcttaggctggggattttgaaatctttgcagagtttcccaatttgttgggcagttttagaaatgatagtatcagtaggaaaaaaaaaacacagaaaaatacaatttcttctttcatctatgtcccatattatacaaatgttcgctgaaagcaccaattttctgggaaaggttttgactcagacttttttcaccctttacctctactctccaattcatgtttccttcttacaacgtggtcatatgcttgcccaggcctggcttatgaaccgtgcagaatatttgtggggtttgttttttaagccctaaactgtgcacatgatgcagtatttaatttggaatgagctcttagtttagtcacatgtgcttcttgtggtgtttatcttggaatccacaagtaggagggaagtatttttgcattttatacatctggacattgttcatggtccttctgtaacttgggaattctgtgtgaggcaaaatccaaaaaaacagcattaaaaataacacggagttatgatgacatctgagtcaaaacccttgagaatacccttctgatcccagcagagtttgtttttgaggtggtgaactttttcaattgtgtgtggttcactgctggcctgaggagaatgctgggattataaggttacctgacacccttgcatgtagactaatgggtttccagacattctgaaagtctattgcagatttggcatagggggaagattttgctttttggcttagggggaggattttgctctaattttgcatggggtaaaataggtaaagtgaattctgctcactgttgctatgcctctgccacaagcattctaagagacctgtgagactgtccctatttctctcttaaacttgcctaattacagccagcttagagctaaagttgactctgagaatgcctcgggctctgtgtcaggactgggggtttagtaaccttatccttcccctgatttcacatgagaagttgttttaaacaggattggacatagagatatagcacagtacctcctccttttggctaggggtctgctaaagtggaaaaagtgggaaaggatgtacagaaactcctgctctttgagtgagtttgcatatggacagtattgctttttggccccagcctagttttctttcattcccatgtctcatcttttatgcagctgcagagagcaggctgggaaagcagaatgaaagcttcaaacagatttgcacttgaataaaagaaagagtgatttctcttgttcagagtacagaccagtttgggtagaaaactgtttgcttttttactttctgggtaaggactgtttgcttttctctctttaaatgtagtaaagagaggaaaagctaataaagtagttggacctgctggttataattcatagagaattttcaagtgtgtttaataaagtctctcatataattataacagaaataagtaattggaggggaaaggttaaaatcctgtagaggtttaagaatcagttaaatatgaggcagtgtgcttggatgagacaactaactaggagctgcttctctttgctgatttctctgaactttccttttgagattttttcctctttactttcgtaatgcattttgcaactttcattaaaaaaatccatcaatgtttaaacttctaacaaataaacatatcctagtcctattatggaaatcacaatgtagcagagaatagcttgacttcagctagagagaggttaatgataggaaccctaaggattgataccaagatcatgcttgtttagtgttttaatgactccagaaggaaatggtgaaatctgctgatgacaccaaattgtttttgctgatccaaacaaggatttctgggaagcttcttcagagtatttggaatagtagaagaattgagaaatatggtggcagacacactgaacttaaagtgaaggtttacgtgaagtagcaggagtaacgtcaatacgttgaagttacaaagcctgccaaatcttccaaaaggaagattacggagtctatagtttcatgaaaggaagacttaagacaaagaacatttatacatatagcaaatgaaaactattatgggaatagttgcaattataaagttcagtgacttaaaaatatgatgtctgaatttctttttaaatgtcagcagtagtatatctaaataggtgttgtttctctcgaaatggtcatagaagattatawacccattttatgcatgctcctttcttggtacgttcttttgtcagttttctgtggtggcaggtctttattttgcaggctgttttgaattttgaaacagtcaactgtcacttaaagccaagtgtgataaataagatgggtggtcaaactaagtaatagatttaaatatattaaatatattaaatgaaatataaagtagtaaaacttattttcttttattgctttcaaaagtgattctaaaggacattaccaatgagaaattgcaaaaatgtttgtgtactaatagtgttagattaagttcttggttgatagatttcacaaacatcacttatttagatatgtaagttacagggcttgtactaatacacattttattatattggagacaaaccatgtttataagtgacctttttaaaatgttttctttatgctccctaaatatacacttagggaggaagaaggaggttttgaattaactggagatttccctaatgtgttgaatttttctgactaaagcctacatttttgtaaagaaaaagaccctgtgggataaaaaatacgataggcactatcacaggagctgtgggctggccatctatatccatccatctatctattattccacccatccctccatccatccatccatttatttaattaagttatttttaacggttggctctggagttgacattcatttattttaaaagaacagtgaatcatagctcttttcctcaagatgcttgcttttatttgcatggtggcatattgattaagtactcagaacactatttgacatatggtaagccctcaataaaagtttgttattattatgactgtacttctcccctctaatgtatagaggtaaacattttggttcctattgtgacacgtgggttataatgagttagggcctacttaagaagaaagtggaaagaaagcgggtaaaattgttgctcagatactagcatgtgggtggagatatagatatagatataggtatagatatagatagtgtaggtatttacatctaagtatattgtataaagtgacggattctgaatttgctacatttctcatttcttcagcactctgggataaaaccagcaaaaatgatgtgatctgaacagacacagtagatggcgctgtaggacttagtttttaaagaaaacagtacagccagggggagtgggggcatggagtgggaagaaaactaaagcacattttaatgggctcttttgtaccaccaagacaatttcatcttagagtacgtgcctctaagaagtaaagatttttttttttttttttttttgacagagctggagaataattttaggaaaactaaatctccctgttgctatgtttgtgccagctttgtcacttggaaagtattagttgttttaagccacaaatatataaggaagttattttctttcaaaacattgccttatttatgagggttttgtttgtttgttttagctgtctttgtctctgtattttaatatttttgctcctagcttttttggccctttgttgtttcataaaaacgtggttgtaaagttaatttgaaccatatcaatatgactataatgtcatattttaaaattcagctatattttaataggccttaaaaatacaggtttacattaaagagtaacatagtgtttttgatactaccgtagtgtgtttatgtacttgatcttatttaatcttagtactaattgtatgaattttattattcacttttctaggtaaataaactatatcagagatacttagtaacttgccaagctcacatacctagtggttgaactagtagttgctgcaagagtttcgccagcatattaaagttgtattttttgagcacttactgtgtgccaggcaagctaaccactggaaatactatagtgtccaaagctgacctggaccctgcccttatggaccttacagttattagataccccacagacattttttgaaatctgctggattgagagtgggtcatgaagatgaatttgaatcattgtgattgttggataagccagagagccctttcaccaaaaagaaagtaagaatcatacctaccttgaatatattactgtattaaaatatttgttttagttgtactccctgtagccaagggaaaggcaagacctcctttggctacaatgagtaactaaactgtcttctagataagaatcaggaagagtaaggaaaatctggctatactataatgtcaaaattttccactgattaaatggtattaaaatatctaaagcaagaaggtgttagttagcagtggaagtctgagagattaatgtggtttgtgtacagcctaagaccatgttaacttctaattggcttctctagtgccatttggtgagatcttttagagtacagccagcttagtgataccccaaattgccaagtacccctttcatcttgggacattaattgtcaaaaatctttgaattgatttttcttcagaaagcttcactttattattttcacacaataccaagttctcatgatatttatgggtatgtgattggtgagaaaacagaccaagagttgttttttgtttgtttgttttttgtgacgaagtgttgctttgtcgcccagactggagtgcagtggcgcaatctctcctcccgggttcaagcgattctcgtgcctcagcctcccgagtagctgggattacaggcacacgccaccacgcccagctaatttttgtatttttagtagagatggggtttcgtcatgttggccaggctggtttcgaactcctgacctcagttgatccacccgcctcagcctcccaaagtgctgggattacaggcatgagctaccatgcccagcccagaccaagagttttaaattgaggtccatgattgggtttcagtaagtgtatggaatgtctaaaattatataaaattttatgtgtatgtacttagaattattctgggaagaaagtccatagtctgcacaaatttctcagtgagtttcataacccttaaaaggttaaaagtggttgtaactagactttatcaaaaggggtgttcaaaagtcactccagttcaggattgtggaaagataactgtcttctcaaataggcatcttagaggaagggctgtttgggttccttttaagaactgtaatcttgagatgtggagtgaatttgggatttgaaaatcccaaaatagagttttggaactctcagctcttagtgatatattctgttttgaaatgagggatacctttcggggaatttgaaaatacttttttctaattcaacttttaatcagataaatgattatttttgaaaaatgaaatagaaagtaataggaaagggggaaaagttgttatgtctcttcgtggaataaatagctaaagaaattaatttctaaattttaaatttcatccctggttaaaatagttcctcttttttgttgttgttgttgttgttgttttttgttttgagatggagtctcactgttacctaggctggagtgcagtggtgcaatctcggctcactgcaacctccgcctccccagttcaagcagttctctgcttcagcctctcaagtagctggggctacaggcactcgccaccatgcccagctgatttttgtatttttagtagagacatggtttcaccatcttggccaggctggtcttgaactcctgacctcgtgatccacccgcctcggcctcccaaagtgttgggattacaggtgtgagccactgcacttggccaaaagagttcttttagagaaaacaaaagtctttgatataagcaatatgatcatacaaatggatattgtgcttttttaaaacaaacaaaacacacaggtttaaggagagaaggtatggatatactacttctgtcttccctatcttctgccatattctaagctttgcatatgttctcctgaggaacaggatagttataacttaaacttgcatttatatatttctgattaagttgttaactatggttctagatagaagaataaagaagtaaaattagatttcttaatttgatatatttaagtcccttattttgatctaatatatttgataaaatagtaatcttttaatagtagccctgttatacataataataatacctatcagataggkttgtggtgaggattagaccatatagtaaatgtaacatgtctagtgctgtgccctgaacttaacacgtgcttattaaatattaactattgctattaccattatcatcatcattaataaacatctatattttatatccccatgacttaatgtacagtataaagcataaatagtaaaattacccaaagacaaagaggaatgggaaggtccagttgattagcttcttgtttagagaagcagattattccgggggttaggaaatagtttcctgtaaggcatgtttagctttcattcatggattgatggcaatataaatcgctcttttgatgtgagaaaaatataatgatggcattacatcaattataaatttcatgagggtagggactgtgttcggtttaccttgtgtccttagctcccattttaatgtctgacccatggaaggcatttcattaaatatttgttgtcatctgtctatgttttcttctttgtctttctttagcttccaaaaagagttgtttttatattcataatttcttatttcatcagtaatgtgactcccctagaagtattggttaaaatacagatctttcttggaaggagactgttttgtttgaagcaaatgacttgggagatgacttaagaacattcaggctttaggtgtttttgtagaaagactaatatttggtcctaaaaaacaaaaaaaacttatcttcatctgtcagaaaattcctaatgtttagcacttaagttgctttgtgttctgatgtatatattataatggaaaaatctgcagcctaaaaggtagtgttttcaattagatatttaagaaacactttctactctcctactttagaggaaaactttacatagcccatttatcttcatgtcttcttgagtcagcaaaacatttacaactataggaaagaagatgtttttcagaaatgaatgctgatcaaaaagaagtatagctactgtggcaaaattaggtaaatagttctatttgttaaggaaaaaatctgtcttgtggagttgtatataaagtacgaaattgaatatatagttatatgttagtgttcctattgcatactagagtctggatatacataggctcagagtaatttgttatggtccacaggaatatatattttaagatggactctcctaagagtgagaggtgatcctacagccagtggcttgcttggttgtaggatcagatgtgattaagttcagagaggagacattttgaacttctctggttgtagaaatgctgcctccctatttcctacaaatatacagtgaactctggatgtcttctgggacagagtagaaatacttgcaacaggaattggggtctggagatatatgcaacccagcagcactgttataaatattttggttttggtagcaaatttgcttacagtatacagccataccttgtagatatggtgggttccgtgtcagaccatcacaataaagtaactattgcaataatgtgagtgatacattttttttggtttcccaattcatataaaagttatgtttatactacattgtagtctattaagtgtgcaataatattatgtcaaaaaagcaatatataggccgggcacggtggctcactcctgtaatcccagcactttgggaggctgaggcaggcagatcacaaggtcaggagatcgagaccatcctggctaacatggtgaaaccccgtttctactaaaaatacaaaaaaattagccgggcatggttgtgggcgcctgtagtcccatctacttgggaggctgaggcaggagaatggtgtgaacctgggaggcggagcttgcagtgagctgagatcacgccgctgcattccagcctgggtgacagagtgagactctgtctcaaaaaaaaaaaaaaaaaaaaaaaaaaagcaatgtacataccttaatttaaaagtttttattgctaaaaatgctagtgatcatctgagccttcagtgagtcataagctttttgctggtggagggtcccctctcaatgttgatagctgctgactgatcagggtcgtggttgctaaaagttggggtggctgtatcagtttattaaaataagacagcaataaagttcattgaatgatgcttgaatcaattgactcttcctttcatgaaagatttctctgtagcatatcatgctacttgatagcattttactcacagtagaacttcttttaatattgggatcagtcctctgaaaccctgccactgctttatcaactaaatttatgaaatattctaaatcctttgttgtcatttcaacaatgttattagcatcatcacccggaatagtttccctctcaagaaaataatttctttgctcataccttatccctcatctgttcaagtttggtcatgagattgtaacaattcagtcacatctttaggctccacttctaatttgagttctcttgctatttgtatcacatctacagttatttcctccactgaagtcttaaaaccttcaaagtagtccatgagggttggaatcttcttcgctcctgtcaatgttggtattttgacctcctaccattaatcagaaatactcttaatggcatctagaatggtaaattctttccagaagaatttcaattttctttatccagatccatcagaagaatcacaatctatgscagaaatagcrttacgaaatgtatgtcttaaatagtgaaacttgaaagttgaaattattccttgatccatgggctgcagaatggatggctgtgttaagaggcatgaaaacaacattaatctccttgtacatctccagcagagctcttgggtggccaggggcgttgtcaatgaattcttttcaaaatattttgaaaagaatcttttcttctgagcagtaggtcttaacagcgggcttaaaatattcagtaaaccatgctataaacrgatgtcctgtcatmcagaccttattgttccatttctagaccacaggccgagtagatttagcataacttttgggggccctaggattttcagagaatggccagtgagtactggcttcaacttagaaagttgccaactgcattagcctctaccgagagagtcagcctatcctttgaagttttgaaaccaggcactgacttctgctctccagctatgaaagtctgaggtggcattttccccccacctagtgtgaggctgttttatctgtatggaaaatctgtcgttcaggatagccaccttcatcagtgatcttagggagatcttctggataacttgctgcagcatctacatccacacttggtgctttgcttgcacctttatggaatggcttctttccttatacctcatgaagcaacctttgctagcttccaacttttcttttatagctttctttcctctctcagccttcacagaattgaagagagttagggccttgctctggattaggctttggccttaaggtaatgttgtggctggtttggtcttctatccagacatttggtcttcttatcagcaataagactgttttgctttgttagcatttgtgtgttcactggggtagcagcacatttaatttccttcaagaatttttttgtttgtattcacagcttggctatttggtgcaagaggcctagtttttgccctgattcagcttttgatacgtcttcctcattaatcttaattatttctagcttttgatttaaagtgagagatgtgtgactgttcctctttcttgaacatttaggggccattttatggttatttcattttttttccatttttttgtctaacgtgattcagagaaatgtagagttattaaatggactaattttcatatttttatgtctcagggaatagggagcccaaaggcaggcagcaagacaggagaatggctgtcctggtggaacagtcagaacacatagacttatctattaggtttgacatcgtacaggagtgtggttggtggtaccttaatagtaatatcaaagattgctgatcacagatcatcataacaggtatgacaataatgaaaaagtttgaaatattgtgagaataagcaaaatgtgacacggacaygaaatgagcacatgctattggaaaaatggcagtyatagacttgctcagtgcakggttgccacaaaccctgaatgtgtaaaagaccacaatatatgtgaagtacaggtgaggtatgcctgtacgtagttggtgcctgtagttttgtatccattgaaatatactgtcactcattgggtctgcaattgggtgtaataataatatcattttattgttaatgggctttgagtcttcctctttcttctgtgatagtttgccattgtcaagttaaatttttatgagctttttcagagcagaaattaaacattaaatggtttattaaccaaaataaggcaactgcctttagactttaatgtagtacccattttttcctacagcttatcgtcttcccagtttaaaaggcttaagcagaagagtaacagtatagttaaaagtttttaagttacaaagttggaacttgcctttttttgattatatgatcccaagagtcacaagagagtaggcagaaagattactgctttatcaataggtgaaagttcaggtttatctgaatttagaatattaaattgtactttaaccataccacatgtttttataacatataaatcataactgacttcatactattctgttattttatgaggtgatctgatgtggctgcaaagttgttaaagttaaccttgaagaaacctcctatggcttagtgtttatttgcaaaatcaatcacattttttcttctgccttattagactgatgaaatcattttctagcatatggaaacattcctggacctcctgttattttgcgtaaataaccccatgtgactcacaaatgttgaaaaagcagtagatatttccaaatgctattagaaccatcaaactaatacaaaaaattcttcggtgggacaaatgaagaccagaatgaagtctaagtcactgtttccagtgaagattagtcactttttccactctaattccagaatttctttaatttttcttgcttatgttagcaacagtattgtcacaaaagattcaacagtcatctcctcaggtaaccaattgttacacaaaccatatgtagaaaatgctcactggcttcatttatagaaaaaaaaaaagataactggaagttagaaacagttgtccaaacttttgaactataataagctattttgaagtgtcattgtcaatacaaagtacataccagtgtgagattttaagcagtaataaaatctatgtgtggaagagtaaatgaagcgtttctgcaatattaatgaacggacagatatatgggaagaagtgatattaaaccttgccatacactctgacaatgtacatgaacagagccagtttgcttgtaaagattagtaacatatcattgcaatagatgtgcatcctgtggtctaaacttattcctaaatgacatcttgaagtttggcctgtccaaaaacatcttttgaggaaggacagatgctatagctgctttcttcaaggaaaaaaaaaaaagtaagtgacatcacaccttgttttaaacttaatgaagtgaagtaaggatgtcctctgaaaaactggccggaagtaggagtagtaggagggggaggaaaaggagaaggaagagggaaagaagctctttaagaaatagaactagttgaaaatattagtatctaatattgtcaggaacatgacatataagagattattggcagagtgcaacttcagaactcttagaggattctaaaagcaaaggaaaaaagttttttagtttagtttagtttagtttttttgttttttttttaataaatgcttactacttctgaatcagacattctttggcatcttaaactgaatgcctgtaattacattagctgttttgtgagacttacatatattctagtcctgtctagtacagaacactatgctaagcattgcagaaagagcaaaatggatattacttctgtcctcagagaacttatctaggaagaggtagaatataaatattcaaacatctatagaaaaagcagaatcaaccatctaagaggactgtgtagacaagacagatctaatccttttattaacataagtgcttcatgaaggaagtagatgtgaactggacattatggtgtgtgttgaatttggacagattaagatgggattggggtaggagttaggcttttgacaaagaaaacagcatgggcaaagatggagcagaggtggagatgtaggggatatttgggaacaggaagcctgatttagggtgaagtataacttttatagaggagaatggtgggagataaaatggcaagtaaagcttagagccaggtcatggagggttttaaaaatgagaatgaagatttgaactttattctctagcagtggggagtccatgaagactttttagcaagggcttggtaggagctagtagctgtgctttagaatgattaatgggaaggatatagtggagtcgggagaggttagaatcaagaattaaaattaaggggccattgcagaggcccaggtgagagagaataaggcctaacataaggtgtggcagtggagacggaaaagaaaagtgaagcatctggtagacagaatcggtagaactgagccatgattgtatgtgggaagtgagggataagagaattggaacaatatttgcatctgagtaactagggcactggttgtaccattaacagaaagaagaaaattaggaagaggagctgatttgggaaattaagaagatgtattaagtgtttgagatgaatgtgtaggggcatatgagaattgcaaagaagagaaagggacaggaagaaaagactgaaaagaaatgtgtgctttgagaaatacacacatttttgagtttgaatagaagaaaagaaggtggcagaagtggtcaaatcagggagaaagaaatcaggacagcatattattaggaagtctctcttgaggtgtgtgatcttgttttactccaactactgtggttttcattgtccttgcagactcttctgtactccatggttatagtaacgctctaactcaaattaattccattgttctttctattgaatcatcacagaagctgttaggactgataatccacagaatgatatgagggatcagaggcttacattctcaatgccaagattatatatactattcctgaccttaccaggtaggtaagattctttgtgcttaattccgcactcaggacagacttggtgagtctgttgcttattttcctgtatcttattagtgagggaaataatattagccattttgtaggtttggatgctgactctcgtgtttgctttctaaatcagcacctgatctggaaaccaagagatgaaagaatttcagtgagaggctagtcagtagcatcatatggtccactctccagaggagaagacagatgaaggttaagaaaagactccactaggtttggtggttttgaggtcactgatggcctttaagaagatagttttaatactatgatgtgggtgaactaatccaagaagttaaagaataggtacattttaaagaataaactttccaacacagactactctttcaaggatttaggagatgaatgggaggatagagatgaaatgttagctataggatcactagggtcaagggaagacttttttcttttctctttaaattgaaaaaagtaagcatatttgtaggcagaggtaaaggagtatttggagaagaagagaaagaaagtactggggagtagggggttaactgttggctgatagatcttggaggaatctggaacaaatgatatcaagtatataggttgagttattgaccttgggaaggaatgtttagagatcagaggagtaagaggacaggagatgggtggaggtatagggagaggacagatgctgagggaggatatatcagacctcaggcatctcattaaaaaagataaggccattggccaagaatgaggaaaaargagataggagaaaaggtgtaaaatagttgcagtgggaaataattaaaatgaggtaaactcagctgaggacagatagttgattttatttcttgcctttttctagtaaaattcagttttactagaatttgtttttgcttaagaaagttccatgaaaggctgcattcagaaatatgaagaattttattgtcagctaattcatgctgatgtacatatcttagatccagaaatataaatgatgatagtactattactacttagggctggatcacaaaaagccaatatgcacttaggatttgaaggtactttcaaatgttataaggaaacagtttcatcagggagtagttgtaggaatgtagtttggaattttgtcaagcatatcttttctgtcaatcaaaggcatggttttgtatgacacagtgtctaactcttgcttctgatttcttctgtttatatgaaagatatttctctaggtttggaagtataccaaattacatgcctaatgtgtaaaagatgtttgacttaattcaagaagaccttaattttcagaattggtgatgataaaaatgaaatactacatatatcaattgctgatagttcagaaaaataaaacatattagattctatgtagctaaaattaattgtatttaatgaacttgacaaacactatagaacaaagcagaatttaccagcttagaggactgtgtagacaagacagatccaatccttttgttaacatgaatgtgtcattaagaaggaacatgtgaactggacgttggagtacatgtagaatttggacagatgaagatgggattggggtaggagtttggcttttagcaatgaaaatagtgtgggcaaagatggaacagaggtggagatgtaggagatatttgggaacattctttccctagttcctttcctgaaagtaaggactttaggtagctttttgacactgtggtggatactcagttcaggtaacatctttttttgttttactttaacttggttgtctgttttttagttttcacttgttatacttaaactgggaagaaaatttaaaaaaacagagacaccagattctttaaattttaagagtcagtattccctttcagtttaactgaatgttaaatgttttaaaatgttaagtatctggccgggtgtggtggctcacgcctgtaatcccagtagtttgggaggctgaggtgggtgaatcacttgaggtcaggagtttgaggccagcctggccaacatccctactaaaaatacaaaaattagccaagtatggtggcggccacctgtaatcccagcttcttgagtggctcaggcaggagaatcgcttgaacctgggaggtagagattgcagtgagccagatcatgccaatgtaccccagcctgggcgacagagcgactccgtctaaaatgaaatgaaatgaaataaaataaaataaaataaaatgttatgtgtctactatctataagatgatgatgagcaagataaaattccttttctcgaaaagtatgtaatctgttaagagacatttcacgtaggaaatttgaattatttcagtaaactatactttaaagggcaatcaatatattaaacaatataatcaaaccaagtcatgcataatatcttatattcctattgtaactaagagttgcactgtccaatatgttaaccactaactgtatgtggctattaaaatgaatgaaaaataaaattgaaaatttagtttcactagttacatttcaagcattcagtagctacatgtgattagtggctagtgtagtggacagcatagatagtgagcatttccattattgtagaaacttctgttgggtagtgcagctctagagctatagaacatattttaattgttttggacaggcttgtccttcatctcttcaacaaaccttcattaaatgcctaccatatgccaggtgttgtgatagagtgagatgataaagtcctagttcctccttacacaaacctttcaatcttgtgggacatcaagtcagtgaatgggtgaataagatagaatgtgataagcatcactataagaggagagatacaagaggatgtgaaaatacacaaggaaaagtacagaagcaacacttaaggtttccttttgtagaaaggtgagtaggtgttggcatggttaagttggagataaagcagaatccaactrcaggaaatgcttggatgtgaaagaacatggcacatttgagggactgaaagttgttgactgtatctggagcccagataatttctaaggtctcttaattcacagtcattattaggatacatctaaactatttaaaaaacactccttcctttttcaaaaccaaagggacaaagatccccatgcaccttccatctatttggggagcttcttatttttatatctgtggatcctacagtcaaaggaaggcaagagaaagtgaaaagaaaataaatttgaaaaagaaggaccaaagaratgaagatggccagaggaagttttagagaaataaaacaggtaacatttgatggagaatgatagtaccatttataacactcggatcgctgtctccagtcagaagtgaacaccaaccattccaaaagctagtgcccccaaatagtttacttggtatgtgaaatataatatgtgagaatattttttgatatgggatttaaaaattgaatttctgccctggttcatttcagcagaaatcatagtagaatttgctttactgtaattttcgtaaatgtatacctttgtagtgtatgcaatatggaagaaatttacattctattattttgtttttatagaatacaaaatagtcacagtcaggttaaaacttacatgagaagtcagagagagagtaggatcaggaaacaaaagaattgtacgttcattcagtcctcaccaattacagagaatattatatgtattatacaaaatacattgcacataataaatctctcacattttgtaaatatttagctgttgttgatttatttctgggctaatggcagccgtcacgtctctggtctgtgttgggaatgtctgtttatatgtctgtgtcacatcatctgctctagcatggaggcttcatggaagacaggaaccatgtctgtttattttgtgtgatagtaacatggagctctatatatgaagctttatttttatttgatgatgatgatggtgatgattttctgtatgaatttctttcctggcttcagattgattgaatcttctgatcactattaatccagtggaactcagaagtggagtttacttttgagtgcttagcctggctaggcagcaggcttttgcaaacacggctatatgagatcttatgccaccacaaagaggcactctcttgaaaaaagatgaaaaatacagagaagccacccacattggttttcatcaaggaaaagtttggtgtctagtcttaccaccaagtgcttgtcaaataaacttggtttgaagtcaagactgaatacagtaaacaaaaaactcagataaaagctatagtaaaaaacaatatttctctttattttcattccttttcttatttgggacaaccttttgaatagtgtgggatgattgaatgtaaagttgatgaggtgaaactgtagccaagtgaataaggtctcagtgctttttaaggatgccctagctctaaacaaattttactattgtatcctacctgtaaaatatttgtctttgtaaacttgcatcactctaaattataaaactgggcatccaaagtcattcatatggacacaactattaagtttagttttatttgttagaatgttcaagatactactgataaggaagcttttaaatatttccttgaaaacctttctttcctctttcaccttgcctctactgccctttctctagatcgatcatgaatttttctattatatttcaaagaatctttagggtttacttgccacatcttctattggagtccatttttcacatcacatttttttgtattaacccattataaatgatactacttcttgtattatttgatttctatgttcatttttatgttttattctataacctattgaggtttatacatataaaataataatcacctgctagtgttaccaatgctgattatgatttttgaatttttagaatgtttgtgtttgattctcctgatttcctttggtcaatatttttttttttttgagacagagtcttgctctgttgcccaggctggagtgcagtggtgcgatcttggctcactgcaagctccgcctcctgggttcacaccattctcctgcctcagcctcctgagtagctgggactacaggcgcccgccaccacgcctggctaatgtttttgtatttttagtagagatggggttttaccgtgttagccaggatggtctcgatctcctgaccttgtgatcctcctgcctcagcctcccaaagtgctgggattacaggcatgagccaccgcacccggccaatactttcttttgaaatttatgttagccttgaaaaataatggtaagccgggtataaatatgctgatctaaaagtgttattagttgacatagttaaagttgataaaacagtcaaaatttaccatgctgtcttctttctagcatatctatattttgacaatgaaaatggttctttactaattatatatttgcttattcctgccaataataagacattctttgtaaaagcactttaaaacttcatagaaatatgaccgggtgcagtggctcatccctgtaaccctagcactttgggaggccaagacaggtggatcacttgcggtcaggagtttgaaactagcctggccaacatggtgaaaccctgtctctactaaaaatacaaaaaaattagctggccatggtggtggtgggtgcctgtaatctcagctgcttgggaggctgaggcaggagaattgcttgaacctgggaggcggaggttgcaatgagctgagatcgcgccactgcgctacagcctgggcaacagagcaagactccatctcaaaaaaaaaaaagaagtgtgtgtgtatgtttgtgtgtgtgtgtataatagaaatatgcaaacataacgttctatgttaagtgtataaatatactacttgacagaaataatactgtttctgttgagcagatgcagaatcaagttcagagaagttgaattgcttgttcaaagtcatgtaatagtaggagctgagcctcaactttataaatggtttgacactactttacttgatctttctataacatcatttcatctcttcctttaaaaattcagaatcgttatgattgtttcctttgtcacctttattttcttagtcatcaagaagactcttgttgttttcagctcagcacttcaggagagcctatagtttttatctttcactttagaaaaatagatttttgttctaggaccctgtcccaagattttaggaatttgatagcatcaacatgagtttagatatagcagtttacccacagtgtatctaggataaaataaatttaagataaatatatttgcaagaacactggatagaacttagatatattaattaacaatttgccacactcagaggaactgccttttttctttctttttctttttttagagacagggtctagctctcttgctcaggctagtgtgcagtcttgcagtcatagctcactgcagcctcaaattactgggctcaagcaatcctccaacctctgcctcccaagtagctggaacaacaggcacctgcctttatgcctggctaattttttaattttttgtagagacagggtctgactttgtggcccaggctggtctggaactcttggcctcaagcaatcctcccttcttggttcccccaaaatgttgggattacaggcatgagccactgtgcctggctacagaatttcctaagttattatttgttcgtttgttcattcattcattcatttattcaagacagggcctcattctgttgttcaggctgagtgcagtggcatgatcatggcttactgcagcctcgacttcctgggctcaagtgattctcccacctcaacctcccgagtagctggggccacaggtgtgcgccaccacacctggctaatttttttatttttatagaggcagagtctcgctatgttgcccaggctggtctcaaacttctgggctcaagcaattctcctacctctgcttcccaaactgttgggattacagacacaagcgaccatgcccagttggaatttccttttttcgatacagttttgatgaagaaattttctgagggctatacttgctaaagcttgaaacagaagaacaaaattggtcactaagaaagtaggagaggttttcattcatatccactgtgtatctgtgtctcagacaaagatatgctggctatcagaatgctgacattgcttactttcctatttttcaaagactgaacaccatacacatagcttgaggaaggatattattcttgtatacattttgacataaagatgtttagtccttggctggatatttcagttctctgaaaatgtgtagctatcctgtgagaagcaaacatcttggaaacagtatagtatagttgaaggaaacggtcctaccgtttccttgcttagacaaatcatttcatctcttcttttctcagtatttttttttctggaaatctactctttttctagaaatatgtatacaacatttaaatttgcatgtgtctgtcaacatcagtgtgtaaacatattatgttcactatgaaaacatttaggaaattcagataggcaaaaaggaaaagagatcgctgactacagcagaaaactataacattctgataaagttagataaaagccttttgggcttttatagtacatgtatatgcacacatacacatagactcacacacatacatgtacctacaaataacatcttaaaatgagttcatattgttaaaaagtgagtttatatagctaaggaagcacatctgaggacaagaacacctctattgcaaaactaacagatgatatagaactagtatggaatacaatagaggtgactaaaaatttaatggtttggagtgaaagcgtggaataatcacggtaaacacaggagtaagacacaaagatgaaagcaatttggttaacaatgatctgatatgaagttgaaaggattactggtgtctttgaggaagtggacccaacaaatcaaactaaaaaagtatttggagaagtgatatagcaaaacttcactgaaatgaggaactgaacctgcagatcaaaagatacattgaatcctgaaaattggtagagaaggttcaacatcatgtcatatcctgattgttgccaaacaagagaaaggtttcttcagtcatgtaagcaaaagcaaaagttatctataaggaagaaaagcaaaagttatctacaaggaagaagtttagactggcctcagacttcacaacaatgtgcaatactacaggagctatgtcaacacagttctgataaaagaaattacggcccaagaacagtgtacccagccaagttgttgttgaggtataaaggccacaggcgtatcctctcaaatgtgaaagaacccagagaatatagtatctgtgagacctttctgaaaaagaactaattgttgaaatttagccaaccaagagaggaatcaaaccaaaaaagtgttgtgatattaaataccttcatatatatatgtaagatttagatactgtagaaagtgtggcagtacaacagactgtaaacactctacatcatggcaaagtaaaacaaatatatacaataaaaattggaaggtaggtagaagggaaatgggaatgagagattattaatcttattcatagcaacaattcaatcagaactgtctcaaatgtaaagtagtttaaaagtaatgttaatctattctttgtggttttgatcatttttcttaaagttagagggactttttcacaattaatgtttcttgagtgaagaaacatttgtctaagatttaaaatttcttcagtttcatttcggcttctgttaattgcaggtaaaattagaattgatattttttatttttaactgtgaatataatctcatcccagaaagaatacatttatttctgtccatccattatctatgtgtatatgtgtatccatgtgtatagaattgatattttttatttttaactgtgactataatctcatcccagaaagaatacatttatttctgtgcattcattatctatgtgtatattccagttgtctggaataatgtcactaattgctaatctaatacctaatatttctcaatggtgagattttggatgatttaatgcatcttttctgtgtattttttgtagtatttgaatttatataatgagaatattttaaagaaagtgatacaatgaatttattgctctgaaaaatgaataaatacttacgcagttttatagcctcatttcttttttaacttatcttgaccccttttctcttaccatcattttaaatagttgcacagtattttatggatgtgttaatatatttcttctttcattcctgatctcagtttcttcatctgtaatgacagagctgaactagattagccggttgcaatctttctctttaaactatgaaatccttccaagaaataaacagtttataactcttggcttaggcatttcccatagaatgtagtttcaaagctgtacagattagataatttctgaggcttatttcattttaccaccaaaaattagggtttttcttttttttaggatttttttgagtgactttttcatgtgtttaaaaaaaatcggtaacagacataatcttatgaatcagaattttaaagtgaaagggactttgaaaaccatctagtatatttgcctaacttttatacatagggaaaccaaatttaagtttttaaactaacgtcatacagccaactgaaatgaatgagacttgagtgcacatctcctgactttctatgctgttcttttccctacagtacacataaatatatatacatatatatttatacaatgatgggcaaacaagatgacaattttattgtactcatgtcacatttaaaccatcatgtaaatgtcaggaaatatgcttaatttatagtgtatttattttcttgttcatgaaaagagatcagtactgcagccattattgaactcctagagttagaaaggaaagtgagtgggattctggcgagaaagaaagcatttacttgtcaaagatttggaatttactgtggttaccaaaattaaaataaaactaaaacttgacttggcagaagattaaaaacaaagcagctccaaagtgtgtgcacatcatggagaagatgccattattccttcaggcagccaaaggggaagggaatattgtttctttgcgttgctggagctgatttatttagttatgatttcaacatgcctacagggcacaccccagaaaacattacacaacaacattaaccagaacaaatggtgctttctttttctgtatctcctcctaaggttttttaacagcagtgaggttttttctttttctttttttttcccccatattgttaaaatggctctgattatgtttgactattgggtgtggcaggttttagaatgttaagtggtagtacaggttcctgaacaagaaagagaattagagttgatgtgacttgattattggaatgtgtagaatgtaaagttgtgagacatacgacggtctaccgcaggttgctcttagtaatggaccttcttgttaaaagccctgttattattgggaatttattttggaaactactaaagaagaaatttgacagaaaagtaaaacaaaccaccttgtctcatatttcctttctacacaggcactttgaagagatatcttaaatattgtcaagtctcaattatcstggcacacgttagcattatcaccattctcacaaacttgaattaaatgcacatggtattgcagcaggtgcagcacagagaaaattggcaaacaagatccttatccttttggagctcagtaagggttgctatcctagtaagtagttcaaccaatcccaaactaatttttccggatactctccaaacaccctccctcccttcctatatcctctgtcttcattagtggcctctccatcctctcagctggaaacctcacattcatcttgagtctttatgttcccktggtcttcacaaccaatctgtcaacaagtcctgtttcttctatcactaaaattgctttttgactttgtttgtactcttccctccattctcctagccattgccctgtttaggcccttttcatcttccatttcagttcttggagagctgcttatctacttttaacctttccattttctaatccatcctccatactcttgtcaaatctctttctttaaagacagttctaatcatatcactctctggtttaaaaacctttgatgggtccccattaacacayaagggataaagtctaaactccttagcttgtcatgccagggtttcagagtctggctctgatctacttattctcatctcattacctgccataatttcccccttaccgtatttcccattgccagacgcacacacacatgtacatttactccattcccacaagcttcctcataattccctgagcttgctatgtaattgtgcttttgatcatgcctttccttgccccatatacacagaacactcttccctgacaaactcttgcttgtatagaggaactgaggaagccaagattttacaaagagtactcttgacaaaagaaataaaccacgtgcatagaccaagcagtagggccaccgttagagcagagttcagactagtggctgccgactagtttctcttgggcaaaccaggaagaaggactcaatcccagaaggtactggcattatagcagtgattaaattggtttgcaatagtattaaatgaatgcctccttcctatttatacagccaagagttagcatttacttttatagctaaaggatagagggaaatagctacagtaggtttctggcatagtagttaatttcaagaattaaaagaaaactcattacccttatctacctactactcctaccttatctcatgttccaaaggtgtaaagaatgattaggaactcacaggaccacgagccttcacactcacattggtgctttttaaaaatcaccaggatagagccagagatgatgggtttaaggggtaaattgaaagagggaaatagcagctctttacctcaagttactgaggaagcagaggcctttttcatgctctgcctagtcatgcttctccctaaccattgcatctttctgctcaacctttgtcctttttatccacatatgattcttttaaaaaattagttcttactatataagtattgtattaacatagtatcttcaaaacatgtggaatgtttgtaaaggcttctctgacattctctcaccaccatcatccccaatcccagctgcctacccaccaatgccagaaaatgacaactattttcagtttggttttctgttgcttcagacctttctctatgcattgacttagagatacatgttgtggatagacaaataggcttatgaaatatagtattgctgtgtgtgtttgtatgtgtacgtgtgtgcttgctttcctcacagaatcagtatcatacttactctgcctctcagtttgcaaacttgcttttttgactctgcccgtagatcttggatatctttcctattagtatgtagagataatttatcacagttttttcaacttcttacatacagtattatatttaggtctagcttaaccctttcctcttctcatagcaatctgatatggacaattagaagagaaaaaaattttagtaactgtgttagtttgttttcatgcagctgataaagacatacccgagactgggaagaaaaagaggtttaattggacttacagttccacttggctggggaggcctcagaatcatggtgggaggcgaaaggcacttcttccatggcgccagcaagaggaaaaatgaggaggttgcaaaagtggaaacccctgataaaaccatcagatcttgtgagacttattcactaccacgaaaacagtgtggggaatactgcccccatgattcaaactatcttccaccaggtccctcccacaacacaggggaattatgggagtacagttcaagatgagatttgggtggggacagagagccaaacctcattcagcctctggccccctcaaatctcatgtcctcacatttcaaaaccaatcatgccttccttatagtcccacaaagtcttaactcatttcagcattaactcaaaagtccacagtccaaagtgtcatccgagacaaggcaagtccctttcgtctgtgagactgcaaaatcaaaagcaagctagttgtttcctagacacaataagggtacaggcattgggtaaatacagccatttcagatgggagaaattggctaaaacaaaggggctacagggcccatgcaagtacaaaatccagtggggcaaattctaaagctccaaaaagatctcctttgactcagtgtctcacatccaagtcatgctgatgtaagaggtaggttcccacagtcttgggcagctctgcacctgtggctttgcagggtatagctcccctcctggctgctttcacaggctggtgttgagtgtctgtggcttttcaaggtggaaggtgcaagctgtcggtggatctaccattctagggtctggaggatggtggccctcttctcatagctccactaggcagtgtcccagaagggactctgtgtgggggctccaaacccatatttcccttccacactgccctagcagagattctccgtgagggccctgctcctgcagcaaacttttgcctgggcatccaggtgtttccatacttcttctgaaatctaggtggaggttcccaaacctcaattcttgacttctgtgcacctgcaggctcaacaccacatcgaagctaccaaggtttggagcttgtactctctgaaactatgcgcygagctgtaccttgaccccttttagcaatggctggagtggctgggatgcagggcaccaagtccctaggctgcacttagcatggggccctgggcccagcccatgaaaccattttttccycctargcttctgggtctgtgatgagaggggctgccatgaagacctatgacatgctctggagagattttccccattgtcttggggattagcattcagctccttcttgtgcaaatttctgcagccagcttgaacttctcctcaaaaaatgggtttttcttttctactgcatcatcaggctgcaagttttctaagttttatgctctgtttccttttaaaaatggaatgcttttaacagcacccaagtcaccttttgaatgctttgctgcttagaaatttcttctaccagataccctcaatcatctctctcaagttcaaagttccacaaatctcaagggcagggacaaaatgctgccattctctttgctaaaacataacaagagttacctttgcttcagttccaacaggtccctcatctccatttgagaccacctcagcctggactttattgtccatatcactatcagcatttttgtcaaagccattcaacaagtctctaggaggttccaaaccatcccacattttcttttcttcttctgagcccttcaaactgttccaacctctgcctgatactgacttccaaagttgcttccacattttcaggtatctttaaagcaacgccctactccaatggtaccaatttactgtattagtctgttttcatgcagctgataaagacatacctgagactgggaagaaaaagaggtttaattggacttacagttccacttgactggggaggcctgagaatcatggtgggaggtgaaaggcacttcttacaaggtggtggcaagagaaaaaaatgagaggatgcaaaagtggaagcccctgataaaaccatcagatctcatgagacttattcactatcacgagaacagtatgggggaaactgcccccatgattcaaaccatctcccactgggtctctcccacaacgtgtaggaattatgggagtacaattcaagatgagatttgggtggggacacagaaccaaaccatatcagtaagcaagtactggttctgattaaatgcaaaaaatgttgcaattgttggtttcaggaggagtgttatccttaaaaattagactgtcttagaaacacttgttggacccagttcaaaggacttcactagcattaacactctctctcctttctttctccttaacccacttctacccaattactgacattgatgggagttaaatgtaaccaggactctttgtttatatatacatctggttttccctgttccgtatgcctaartcctccctccattgcttctgtttagcatttaatgtaaatttccaaattaattcaagaagaaaatttgaaatatataagatgagggcattaggtgatctctgagggcttttacagctctaggattctattaggttattaataatttatttccagaggatacattctgataaactaagaagttttctgtgcttgatttagcttttacttaattaggaatataaataactaaatatttaaatagataaaacttatgctatttgtcactttttcttgaagcatatttataatgatcatttaatgttcaaagtaaacctccaaaaggacttggtaactgccaaatattaccaccaaactgtagactaatcaattagaccactagtatttgaatttttttcttttactatataaaactaagaaacgtggactgaatcaaagtgaatgggagctttggataaaatattggtaagatgtttgcacttactgtctgcttttgaatgttcagatatttaagaggtaccatcatataccacgaacaaaaggttgggagtcaggaatcagggaattagtcctagctcatcactgtctcattttgtgattgcaggtcatgctttgctcttaaattttcccatctttagcatgtagtagattatttctgacccttaacttacccagggatgttttgtgaaataataaagataaccactgccagttattttttgctgctcagtaaagattctacacaaattaatggtagcagtagggtggttatttcattatttaagaaagttcttcaaagtgagagaactacccagcataggtcatttggaattgctgtttatttgttcttttaggccagcaaaagtgttctatgttaggtagaacagtgctaaaaacttacataaaagcaaaggttttgtaagttgtaggagccagtccttggtggatctagttctttccaactcttgtttttagtcatctgcttttataaaagtgagtggtcttaccttttagttgttttttttttcctaaggtagatttttatttttatgtttattcatatattctgtatgagttctgtcatcttgataaaccttggaatagaaagtcatatgtaaaatttgccactttacttgaattctaacactttttgtgatgttaacctgttagattctcattctaaattccacttctcaccttcttgtgattggttgctgtttgttaggaaaacatgtaacagattcttaccctctttgaaaaatcactgttgttctttttgttgatgcagaacagcagtaattttttctctttaaaggaaaaataatttagacaaaggagatacttgagaaaagagtttaaagaaatttactgttttctcagtgtacttcttttcaaaatgatgtcaccccaagtgttataattctttcaaagcttagtgtccaactggtgaacaaaactaacagttgattgcctcaagttcagcagtgtttgctgtatattttctacatctgtggactattctgttatgacataaaagctattaaagattataatttttaaactatatatttcactaagtatttataaacacgtatgaaactcgttctaagtataacctgtactgaaatgaactgttcatgtttatgactcagtaggtaaattgctctggagtgcttcagaccaggctcagctgaagcaaagcattttgaattgatattgttaggaaaggttttttttccttattcaacggttacatgcgaattttaaaagatttcttgtgtttggttagttctaaatttaaatttgttatacttcttatactagtagaatgtttcctttctatctgcagatttgagagttggtcttggaatatggctttgcagattaaaaaaaggttacttttaaaattcctcttaaactttataattcaaatcagtcaagtaaccaagaagagaaattagagaggataccattgacttgctttgtatctgttgttyttcctttccttctctgcaaaggtaaactgaattgcagctttgtacttagaagtaaattactattaaaataaagacagtttaatagtattttagaaaatgtggaaaatggaaagatgggaatgaactataaaagatagaatttgagctgagtcttgaagaatacattgttcttgatgtattccagacttccccttagacgttttttattctttgtgactgttgtgtgttatgtgactacttaggtcatcctccctcagggggaatagttggacgtttattctccaactactatgtaagcaccatcttaatatttgcccttggatgagtcacatcactctgctttgccttaatttctccatctgtaaaatgataatggctatataattttagatttattgagttcagtggaggcaaacctttaaagtatagagatggctttcactgtgaatgaatttaagataaaagatagcattaccacaacagtgcatttttctacctttaacacatatgttaaccacatttttgtgggggcacaaaaataaggatttggcatacaagataatttgagtgccttgtacgtgttctagctggcaataatcctaacccttgtactcagcatctggtttattcatgagatcccctgtaattaaccagtagtacttctcagtcttgtcttttaggaagatttatggtatacctcaggtggtgtcagatagcaggcagaagacagatgagtagctagttctctttatttagaaaaaaattctgtctccttgacaccaatattgttaaataagatatgatttctaaaaagccattttccctgtttatttgacatgattggcagctctactatctgaacacctaagaagtttaagtttcttaggtgtggttttagagtcttaggaaagctgggaagggcctagactttagaggcgacaggcttatggtgtgtcctggagtgttacacaaggaagaattattagggccaggtgcctttcatgtctatgtctgccaaagtaaaaaatgcagaggcaagagtttgtctcagcaatagtttcatacattatctacacagagaaaagtgactatttaatactggcaagaattcaaatactttctatgtaatcaatatcaaaagagggtaagtttgttttttgattggttatcaagttgatatacagtcctattgctgtggtctgcttaacctgtaattatcagagaaatcttgtcaaacaagattttctgaaatgaagcctgttaattatatcagatcctttggttttatgtggaactattatcatgtcatgaattgggaaccgtttgaacaaaatactgatttggaaaactctttatctcaaattttgcttgaaacccatgacatctaatggaaagggcatggtgagaggcaacactaaatttctaagctgaactcttttcctaaacatccctcagtgatcattctcttgtatgagtagatcccaacaagggtagggattggttagtttcagggcatcttatctaaacattcgtctaggggcaggtctatgctggttagacacatagaaatcaaaattatcaacacagtgatgacaatgtaattggccatatctatcagcaacttataatcaaccatatctaaggctgctgaaaggtacaccctggtaaaaattctggctctacctttgactttcattactgaccctaaggattttggactgaagtctgtaagtgagcttgaattcaacctggaatctgctttgaccttgtaggtaaatagtgtgcaaagttaggaaattagaacaaaataaaatttactttacagctaggataaattgtgataaaatgagaaattggcagcaagaagttttagtgaataggaccctcaaaggaaacttaaacaatgttgaagtgatgtttgctgccatcagacagcacacacacacaaaaaactatgtctaaactgttaaagtggattttatgtaaattgttcatgataaacatttgcattatatattcctattcctttgtacttcccatttgatgaagttttcaaactgtggtttgctggaggggaaaaagaaaacccaaatccaaaccacataggacaaattgaattacaaacctggtgtggtcccttaactcaattacatctaatttgtgttattttagtcatcctgggtggcagctgttctgagtaaatgcccacaaacattttcaatgtaagaatttgtcctgattacagctctttaagatcagtagtagcctatttatattttaagtggcaaagttttagattaatttggtgtatcaggaccattttaaaaattcaaaatttagttgtttcacaaatagacatttaaaaagcaagcatccaatgtttattttaaatgttaatttttgtaacttcacctcattttcttatttcttatgtttctacttatgtttcttctaaacatagccacttaattactttattcaggcatttatcaacttgcatatacaagggaatatggaattttagattcagataaatgctttgacattccaagtcaaaatttgagatgatctgggaagaaaaacatgaaataatatgggttcaggattgttcagttcaatataattaaaacggaggtttgtgttagaactaagttaagattgaatattaaatacaaaagaaatgaagaccttgaaactcatgaaagtcttgtggaaggaccttgactagtgttctaaggtagacaaatgggaccaggctaaattttagggaattacaatgaagagatactatccagcagagacagtaatgaaagaaaactcctattacttcaaaaatgatagatggtacatgaatatgtttaaaagccattgtttttctactaaattcagtaactttcagttagcaactgaatatcttttatggactagatattgatctatgtactgagacttcaaagatgaataaactaaaggttcctactttggaggaacttatactgtagttaggatggggaacatgtaaataatttatagcaacatatggtaggtgatatgataaaggtttgaataaattcaaagctttttcttttgtcataaggagggtataggcctaaagttagggtattagatcaaaacaagtgaaatttttgtttaaacttactacagtacatgagacttatacttcactagatatttaatcagttaatggtcgacccatagacttaggaatataaattgtttaaatttgaggtgtttatcagttgtgtacactttttccctactcattctctttttatggaaaaaacaatttggtaatcaattatgatatgtattttcttgtatatctcttataatttttaattagttgtgaactgtatcaactttaataacattttaaaagatgttcatcatcctatattcctcttttatatgtgatactgactactaatctactatttatttttgaaattatttttggtcttcagtggtagtgtgctttttttggtttctctcccacttttggagagttgatatctgctttgctggcttcacatctgtattagttatcaattgccataacaaattaccctaaaacttagccgctttaaacaatgaacatttattacctaatggtttctgtgggctagtaatatcgtatctgtcttattcacatgtgaatgatgaacattcagacatccgataaatattattgaatggtgcacaaatgaatgctgttattcaagttgaggttcttatcacttagcacctaatgggctccaccatcttctttgctggcttccaatccttacccccatgctgtttgtaaaaccaccctttcaaaagaaatttatgctgctgcttcccttattaataaccagttgtgactctcattggcctaatcaaatttctgttggtctccttggcattcaaagccttccataaaccagccttatcatatttattcaaccataaaccttaacagatatacctattttacttaaactggttgtttatactttagacctgttaaaagacaatccttaaccaaattaaatataactcagtttaattgagcaaatctggcggcttcttgaacccgagtagtctgagagagactccattgcagccacgtgctggaagatttatggacagaaaaaggaaagtgacgtacagaaaacaaaatagaggtacagaaacagctggattggttacagctccgcatttgccttatttgaacgtagtttgaacagttggccccctttggccaaaactcagtgattgtcacaagagcagattacagtctgtttacacatccttttagattatagttcacactgtgtagagaaacctttaggctgaatttaaaatatgtaaggaggcagctttagggtaaacttgatttaacagaccaaaccttatccccatccctaatatcatgttcagttttactttcttacctttattaatgctttattccctcatctgtaatgcttatattccttgctttttcaaatgttgttgattcttgttctccactcaaattctttatgtttcttgcacctctttcataaacccagtttggacttttctggcccactccagttgtttttgttttcgcttgatttttttttttttggttgttgttgtttgtgttttgagacaaggtctcactctgctgtccaggctggagtgcagtggcgtgattatggctcactgcagcctggacctcctgggctcaagcaatcttcgtgcctcagcctcctgagtagctgggaccacagatgcatgctaccttgccaagataatttttaaaaattttcgtagtgatggggtctccctatgttgcccaggctggtcttgagctcctgggctcaagcgatcctctcatgttggcctcccagcatgctggaattacaggtgtgagccactccacttggctcaactctagttttttgttttttgttttttaattttattttatatatttttattattattatactttaagttttaggatacatgtgcacaacgtgcaggtttgttacatatgtatacatgtgccatgttggtgtgctgcacccattaactcgtcggattaaagacttacatattagacctaaaaccataaaaaccctagaagaaaacctaggcaatacaattcaggacataggcatgggcaaggacttcatgtctaaaacaccaaaagcaatggcaacaaaagccaaaattgacaaatgggatctaattaaactaaagagcttctgcacagcaaaagaaactaccatcagagtgaacaggcatcgtacagaatgggagaaaatttttgcaacctactcatctgacagagggctaatatccagaatctacaatgaactcaaacaaatttacaagaaaaaaacaaacaacctcatcaacaagtgggcgaaggatatgaacagacacttctcaaaagaagacatttatggagccaaaaaacacatgaaaaaatgctcatcatcactggccatcagagaaatgcaaatcaaaaccacaatgagataccatctcacaccagttagaatggcaatcattaaaaagtcaggaatcaactctagtttttaatctttgaattctcgttgcattaacactcagtaccaaacagtgcctttctttatttttaattagtttaagtgggtgaatatgtctttccaactagaattccaattttctgacagcaaaatccttttacttctcgcatctttattgtagtgtgctgtgagtgtatcctggttgattgaaaaactagaaatgttgattcacctgtatgtaaaaaatcctttttgagtgaattttaactgctagagacattcatgaggatgagctgggactgcaggacagtttggaactacattttattattttcctgaagaaacattgctgtatgaagagattaactttaaaaagttccctccggccaactatcagaattggcttttagccttgaactatcaaagcaaaactttcagtgttgcctagagcagaacaggtattaagtagcaagcaattcaaggtctctgatccctagcctgcttcagctatgggcctggccaagccctttggcaaagataagttgaataaggaatttacttttatcttctccctcttggaagttttatggatttgattcacaaagaaagggcaataattgaaattttgtgttagcttcttcttgttattcaccaagaaaagttaaagtcaggtaatgatatcaatcaaaatgtaagtacrcctactgcctaaaaataacattgtggttaattgtgttccataatattcttggcatactttgcacaagccctggagaacaaagcctgagagcccatgggaaataaagctccagttctttcggccactttaaatttagttctgtgatcttgataagatatcattgtatttacattgttagtttctaccagcattcccttgtatcttcttttatggctttttctatttctgtgcctttttgttcctcttccttattttccccctaaagccataggtagaatgtttggttttagagttttataagaggagtatttgacttttccttatagcgatctcagatttcattaagtttgtgttttaggatgatttataatatcagtctatgatttgggctattatttgcacatttttggctttcctgtggctaaactactggtgtttatataaaaaagatttttttttatttatttatgcatgtaggggtttcagccaagattcctgtctttagtactggaatatttgaattagagaaattaagaaagtgaaaaaggctaaagttcttgattcttaccttttatccttatagttaatgacttataaatatatttctttgggaaaataaagaatatcaattgactgtcacctcagttaatccctccagcctctgcgttttttcctctaggtgacctgtaagggcctgctcaataaagccagtgtgatgatgttagctttgttgcatcttttagttttcttctttactcatcccacacttcccatacatatcccgcttcccttccctggtgtgtttaaaggtaaaagaagtaaagaagtgggagaagagacagtgtgaaggaggtgcagaggcagacatgaaaaagtgtcaggaagaagtctgagtgtagcccttaaaagactattgctttctctagccactaccctattctgctttgttcctgttgcccctactttaatatttctaaaaggagtttaaaataaaaatgaaatccatttgaatttcagtcttgaacactcaaataaaagtgcttttctgaaaatctacaatgatgtttttaaaacaccttccttgatcactctgctgcattttatgcaaagatgagcatttccttctgaaaaaaggaaaagacttattgactaacttttgccacatgaaactgtataatcaacctcatttgaaagtgcacatttcatttgatggcatttgcaaattgttccttccccccaccaccagaacttgcaatgtgaaaatgcttccatatgctaaaagctagtctactaattttactgaaggagaagaaaagaaagtatggctagccattttctaaacatgaagctacagtgtgggcagatttggcaatgggagcccctcagagttcactgtaaacaactctgcaacccccaggcctcactactgttcaagatgagtgtagaaagttgtttttgccccacaaaagtaaatttttaaaaatgcaattgtaatgtgtatatagttttaaaatatctaaatgcagttaaaatatagtattaaactctgatttctaatagatttgaacattttaagtgaagaaatacttttgctttcagattctttgtgtatctcaagacattttaatagttttcaagacatttaaactgagtcttcactctgggtggtgggcccccaacccctaatgcgtggcttatagcaatagttttctccctgattttcctaatattagtcattctcccttttaacactgcgctacttggtgctactaggataatctttcataaataacattatgccttttcctgttgactgatctcatttaccctaatctcaccaatatttctcccaaatctgatttataattttctttaaggagtcttcgtagtaatcccatctggccccatttttcaacagtacttttgaaccaagcttctactattattattttcatgttgatttattaaagttttttaaaaaattgtattatgtctgttctttttttcccaagtagatatcagtgtgatggaaacactatcttctatatcttttgactggagtcttttatacttctgagtacatgatagatgttaaatatatactctgttaatacatattagcaagtttaaaatggtggctgtttgtttaagtcacataaattatcaaacaaaagagctgagtgatggtacctgcacaatgcttaatatatagtagagatgataaaataaattctactgaagtctgtacttcatctttttaaaaggtttattgcttagcttttagaattaatggttttatctttgaaatagagaaacaggtctagggttcatgcagttataaataaaaattccttaattttatttctattactgtagcatcttatgccaaaaaaaaaatatcgtaaagaggaagaagtggccaggcatggtggctcatgcctgtgataacagcactttgggaggccgaggcaggtggatcacctgagatcagaagtttgagatcagccttacccacatggcaaatccctgtctctactaaaagtacaaaaattagctgggcgtgctggcgggcgcctgtaatcccagttatgggaaggctgaggcaggagaatctcttggacccaggaggcagaagttgcagtgagccaagatcgcgccattgccctccagctgggcaacaagaacgaaactccgtcttaaaaaacaaaaaaaagtggaaaaaattagaggactaacattacctgattttaagacttataaagctagagcaatcaaggcagggtattggcataaagatagagaaacagatcagtgggaaagaatggagagtccagaaacagattcttatgtacatgggcaactaagttttcacaaaggtataaaggcaattcacgggtgaagggccaaactttttaacagatggtgctaaaacaattggatattcatgtgaaaaaattatttatatcacataccatataaaaactaactcaaaacagatcatagactaaaatgtaaaaactaaaactataaaactccttaaagaatacatagggagaaagtctttgttatcttgagataggaaaagatttcttctatatgcctccgaaagcacaacccataaaagaacaaattgataagttgaacatcatcaaaatttaaaatttctgctcttgaaaagagaatgagaaggcaagccacagatttgtggagatgatatttgcaaaacatattatgataaaggacttatattcaaaatatataaggaactctcaaaattcaataaaaaatcaaacaacccaacaacaacaaaaggtagacatcggatagagtatggtggattacatctgtaatcccagcactttgggaagccgaggtgagaggattgcctgagcccagaagttcgagaccataagcacatgaaaagcccaatgtcattaattgttagggaaatgaaaagtgtactgcaataccacatcaaatattacttccttttctataaatatgtacaattattatgtgtcaactaaaaataaaagaaaaaaataaaattaagaagactaaccatatgaaatgttggtgaatatgtggaggagctaagtcttataccctgcgggtgggaatgtaaaatggtataaccactttaaaaaatagtttggcagtttcttaaaatgttaaccatatacccaccgtactcttcagccatgtcagttagctttttacccaaaataattgaaagcatatgtccatgcaagggcttgtacataaatgtcatagcagccttatttataatagccaaaaatgaagtcacccgcatgtccatcaacaagtgaatggataaacaaactatagtatatccatataatggaatactatttacaataaaaatgaattaattattggtacatgtaacaacatggatggcacttaaaataatcatgctgagagaaataagtcagtcaaaaaagactgcgtgctgtttgatttcacttgtataatattctaaaaaatgaaaaataattcatactgatagcagatgggtggttacctagagatggggaatagaggaggagaaaggaattacaaagaggcacaaggaaacttcaggaggttaaagaagttttaactatcttaactgtgatgatagttttgcaggtatatacataattcaaaggttatccaattgtacactttatttatttatttatttttgagacagagtctcgcattgtcactcaggctataatgcagtggcgcagtctaggctcactgcagcctctgcctcccaggttcaagcaattctcctgcctcagcctcccaagtagctgggattacaggcacacaccaccatgcctggctgttttgtatttttagtagagacggggtttcaccatgttggccagactggtcttgaactcctgacctcaggtgattcacctgccttggcctcccaaagtgctgcgattacaggcataagccaccatgtctggccccaattgtacactttaaatatgtgcagctttttatagcttagcaaaattatacttcaatttaaaaaaagaaaaaattgtaaagaggtgttaaacatgcagttcaccattgaaagcaatattatttaacatatgcactagcatattataagtataataaatgtaaatataatttatgtatttataaacataaatataacaatgaacatatacattattgaagagtcccatatgtcaccttccatcttgggttttatagttactaaaatgttatcaaaggagaagaccatttcataaaggaaattattacaccttgaccatccaatacttcagtctttcattttgcgtggaagttctgtatcagctaccatagtcattttttaaaaataacagcaatcttcgttttttgaaaaactatcataggccatctcaatctttatctatcaatattttccttctttcactttcttgataaagccccatattttgcttctgcttctatgtttttttttaaaaccaaatgattactaaacagggagtgaaggtccaggtgtggtggcttatgcctttaatcccaggattaatctttgggaggctgaggcaggaagatcacttgagcccaggaatttgagaccagcccaggcaacatagtgagacacgaatatctacaaaaatttaaaaaattagccaggcatggtggcacgagcctgtagtctcagcactttggaggcacaggtgagaattgcttgagcccaggagtttgaggctgcagtgagctattaccacatcattgcactctagcctgggtgacggagggagaaagaccctgtctcttaatctgtagaaactgtctaatactattactactgtattagttaaatgactcatttacagcataatttgggaaaggaaattcttggattttatcccaagtgaggacttagaaccaagtgatatagtggttaaaataagagtctcagccaactagagggttagaattttcttggtatttaatgtattgtgcttaatttatcattatgtaagtaagctcaaatctcattggtctctttatataaaaaggaaaaaaaggaaaaagagcagaaaagataaagccccatattttgctgcttctgttttgctgctattgacataagaaggcctatgtagtcctatgtaggcctttttatgtcaatatcagtctgagtaaaagcaaataatgaatttatgctgaggtacaaatataccatttggacagttttatattaacatctgacaatgtacaaaagttatacaaatttgttagcattttctcactgcaaaatattatcaaattaggaaatagcagacactagggatggtttttactatatataatgatgtttaagaggtacttaaacttgatttaaaagctctgcagtgatttacctaagatgagcctgaagagctaatagtctagtttttgttttttaatttttatttgtagcaacaagcacattaaccatttgattttttttatattttgggagaaagttgtgaccatgtggcagtttggatttgaaataataatggcaaataagtggcctgtgctgaaaattgttaggcatatctctttatggaaaactactttggtgatataaaaccaccgaggtctatagttatataatttaggcaagcagaaaaatcagacagggctggttttttttttttctttctttcttttttttcttgacagtgtctccctctgttgccaggctggattgcagtggcgcgatcttggctcactgcaacctctgcctcccaggttcaagtgattctcctgcctcagcctcccgagtagctgggacaacaggggcgtgccaccacacccagctaatatttgtattgttagtagagacagggtttcaccatcttggccaggctggtctcgatctcttgacctcgtgatctgcctgcctctgcctcccaaagtgctgggattacaggtgtgagccaccatgcctggccagggctgggtttttattaaagatttagtttcgttcttagaagttatgtcaatttctgatgagtaatctagtaataacttaatctgtctttctgaattaattctgcaaaacactgccacatactgattgttgtaaacattgttggtttcaagacactttcttattttaaccctcctaacctttcaaagattcctcattacttatggtttaagtcattccttcttgttttttatattcaagacctttcacagttgatcactgagctgtcctttaatcctctgtgtcactgcttttcagtatgaattgctaaagtttctatgatttttctgtttctttgccttttgtcaatctttgttcagtctggactctctgcctttctctcatctctacctactcttctaagccctagaatgcttcaggtaccacataaaccacatcagcataaaaccttccatgacattctattcatacatgttgtaaatgcctcttttgtgccgagctgtcagtggtcaccaaggtaaggacaggagcaaaggatgctccgtggtactccactctgatggacgaggaaaaatgataaatttacaaatattttatctcatcctatatacattttactttttatttatgtcttataatgtaagcaataaattggtacccaaatagaaagtgtaaaataattaaaatacatatgttgagggagtgcatgcccaaaatgttttactgatggggtatagaacaaaaagttaagaaaccaccgatctaattgtcaggtctgtttccgcatttgtaaagttaggtcaaggattggactagataatttccaaggtcttttttaagcttaaatgttcatggagttaaaaaaattattttgaaatctttaagtatacagaagagttgccagtgtagtacagtcagctcccataagccattcatgtggttttatccactgttaacattttgccatatctcctccttgtcttctaatacatatatatacatattactatacttttgttctggaccatttgctagtaaattgcagaggttgcaaccctttaagctawgtagtttagtatgtgtcccttaagaacaaagacattccrttataagatgttatgtaagagactcagcacaaaagaggcatatgtaacatgtaggaagagaataacagtaattgatcaagttcaatataccataatctaacatagagtccacattcaaattttgcctattgtccctttatgacctttatagcagttttttcactaatctaaggattgagggaataggaattttcttgccatgtctatttagtttcctttaatacagcagctttttagcttttccttgacttttgtgacacggacagctttgaaaagtaaaggcccaaccagaaacagtggctcatgcttgtagtcctagcactttgggaaaccaaggcggggtagatcgcttgcgttccagaccagcctgtgcaacatgatgaaaccacatctctacaaaaaaaaaaaaaattcaaaaattagcttggtgtggtggtgcgtccctgtagtcccagctacttgggaggctgaggcggcaggatggctggagctcaggaggcggaggttgtggtgagctgaggtcgtgccactgcactccagcctgggcagtagagccagaacttgtcttaaataaataaataataagaaagaaataaagaaaagtaaaggcccttaattttgtataatggctcatttgggtttgcataagtgtttccactgtaccttgatttgtgtgtgtgtgtgtgtgtgtagtttaattctgtgtgtgtatgtgcatttgggtgcacacaatgtgcacgtacgtgctatggtgctgtgtgcgcaagttgagtcctcttttccaaaatagattgtaaattccttatagacagagatgatttatcttggtaatttttattccccacacttctatgcacgtatgatacttagcctatgattcaaattaaaaatattcataagtcaaaagttcttacatatcccatgggttaaggagatgatttaaaacatacagggaagaacatatcagattaattaactctcagtgattaaggatgccagagaataccatggtaacaatagaagcattatgttttattttattgaatcttgaaggaaattggatactccaaagtataatataatatggaacatgcactgtgaatactgtactagttgacatgtgtaatttcttttcatcatttctctgtggaaaccctttgcaataacgtttgaccttttttccatatacagagtcccaaaatagtattttcatctgacatgtgtattttaatgggtagttagcacgaaagatctttgtcttttaaaaatatgtttctcaagattgggaatatcttcagttgtcagtaaaagatctcttattatccttttattatcaaataagcatagttgtaagacagtgactcatccaaagatttgttgtggctgcttctatctatggtttttttgtgagatggagtttcgctctgttgctcaggctggagttcagtggcgtgatctcgactcactacaacctctgcttcccaggttcaagtgattctcatgactyggcctcctgagtagctgtgactacaggcacacaccaccatgcccagctaatttttgtatttttagtagagatgggattttaccatgttggccaggctggtctcaaactcctgacctcgggtgatccacccaccttggcctcccagtgtgctgggtttacaggtgtgagccaccacgcctggcccccttcagtctattttttatttttgtgggtacatagtcagtgtatatatttatggggtacatggtatgttttgatacaggcatacagtgtgtaataatcacgtcatggagaatggggtatctatcccctcaagcatttatcctttgtattacaaacaatacaattacaatcttagttattttgaaatgtacaattaagttattattgagtatcgttaccctattttgctatcaagtagtaggtcttattcatttctaattattattatttttgtacccattaaccatttccacctcccgctaagtccccactacccttcccagcctctggtaaccaccattctactctctatgtccatgagttcaattgttttgattttaatggttagtacaagtaagaagtttttcattttaaagtcagcatctgaaaagatacattgtagcctttagaggctctgatttccttgaagcctgttacttatttgtaaaggtccatagtaagattgaacttactatttggaattttaaattggtagcttcaagaactcttagaagatctttttttttcctattttaatgaagaacatttaatatacaggttttcttagtattgactttcataagtattttctggggcaattactatctcagttgattatctctgaaggcctattttaactctacatttatctgaacttaactgaataactcctcattactcagcacatattttagtgaagagattcttaggagtaacggctgacattcaccatattgtggtttgtctgtgtgtatgttcctgtggataacttggcaatcgcttcctcagcgaaataacagccagtgtggttcagccaaagtttagaggaataaagtaactgaagtgggaggtttttctgtaatgccgagtgattttattcttggttctttctttttgaattgctcaggtagtgtttgccgtggtaggtattaaaaccaaaccaagcaaacaaacaaacagtaaaaacccaataacaaccaacaaacaggaaataccaggtaattcagattatctagttatgtgccatagtatgaacccaagaactcttcctgtaactccaaaataaatgtatgcttaggtcagaatctgagttagaaatgaaaaacaaggctaggtgcggtcgttcacgcctgtaatcccagcactttcggaggtcaaggcgagcggatcatgaggtcaggagttcgagaccagcctggccaacatagtgaaagcctgtctctactaaaaatacaaaaattagccgggtgtggtggcaggcgcctgtcatcccagctacttgggaggctgaggcaggagaattgcttgaacatggtaagcggaagttgcaatgagccaagattgcaccactgcactgcagcctaggcaacagaacaacactccrtctcaaaaaataaagaaataaagaaataaataaataataataaaaaagaaatgaaaaacaacatcttgtctattttttccaggatcaggtgtaataggaaactggtgatgcactaagtttttcacagacatggcttgagaatattttctattttatatgcttgttaattttttaaaaataggattgtttgggagcttatttccactgcagcaggaagaggcactgtgattcactgaattgtgtgaattaaaggcatgatcaaggaacaggccattgaaaatgatggccctgcagtattaaaagtgctttgatcttctgttttgacacattgaatttatctttaattatatgtgatgacatttgattactatacacttagactattataatgtggtttgtaaaatatagtttgtaatgtataataacttcaacaccgatttttctgtagatatgaatttacagagtcatgttttagttttgtttaagagaaaactattagacttctgaattaacagacatttaaaaggtaaatatttagtagtcaggcaaagtatgattcctatacaataagtattaggactgtaccctgtgggactcagtgccttattttaatagaggtaatagaattctatgtggtggtttcctgatctatccactactggctgctttactacaggtaaatcacttagttctctgagcctttgaaaaatgaaagccttagactacatgatattcaagattttaattctgaaattctttgaatctattattctgtgacgtctttgatggacataatatagaattccatagaaattactgacacattttctaaaagaaagatatttttaaaatattgtgtgaattaatgggttttgaccttgcatttaaatatgaaaatgaggccgggcgcagtggctcatgcctgtaatcccagcactttgggaggccaaggcaggtggatcacctgaggtcgggagttcaagaccagctgaccaacatggagaaaccccatctctactaaaaatacaaaaaaattagctgggcgtggtggcacatgccagtaatcccagctactcaggaggctgaggcaggagaatcacttgaacctgggaggtggttgtggtgacccaagatcatgccattgcactccaggctgggcaacaagagcgaaactctgtctcaaaaaaaaaaaaaaaaaaaaaagaaagaaagaaaaaagaaaaactttaaaaatgcacttatgggacagtgggttggggggcaaccccccacaggccacaactgtagagagaactttcattcggaatttcctttattatgccagtaccttagccttgagggtrtgagtctttctttgaaattgtctgctttgcttgcatttacatgctcaaccctggatttttcccaatttaggcagttttattccccagcaatgagagtccttaagagtttgaacctgatcctaattctctaggggaaattacaaattattctttcttttcaaatggtagccatatacagtgattttacttttaacatcttttttttttttttttttttttgaggcagagtctcgttctgtcaccaggctggagtgcagtggcgcaatctcggctcactgcaacctctacctcctgtgttcaagctattctcctgcctcagcctcccaagtagctgggactacaggtgcacgccaccatgaccagctaattgtggtatttttagtagagatggggtttcaccatgttggccaggatggtcttgatctcttgacctcataatcctcccgcctcacctctgaaagtgctgggattacaggcgtaagccaccacgcctggccattaacatcatttaatcaattttgtcaatgtccctaatgggatagtcaggcaaaaacaaaccaacaaaattctgtaagaaaagtggctaattatacattatcattaggaagcataatatttcatgtgtttttatcctgaactttgtttctttttgccatacaacccgttccttactttgtagggaggacttttattgtaaaaaaaagatctgcctcacacaattattggttatgactatttatcacctaagaactaaacagtggtgctttgatttgagtttgtttactcgagaggcagagtatgttttatctgtaagtactttgggatttcttttgaactaaaaatatacaaatacaattattggttatgactatttattgcctaagaactaaacagtggkgctttgatttgagtttgtttactaaagaggcatagtatgttttatctgtaagtactttgggattttttttaactaaaaatatacaaatatgtatagtttgtggtaagtaggtgacagcgtgaaaagcaaaactggaaagctatgatcctacagctacatatcaagctaccctttttttctcaaagactattgctgtgttaagattttattatagcatttgtttctttttagagagggtagaagggtgaagccttactcgaaaccatttcagagtagttaactccagactatatactaatggagaagaagagtaatacagataagttaaaacattagataatgattgctctttattgctttaaaaaaacatggggaagagcagttgggaataggacccaggcacttaaatctgggaaactcatttttggtctttttttcccactgctgcagtagcctgggcaggatccctagagacacagccttcaggcaggaagatggaggagagaaagcagatcacagaccctaaacatctgtaggttctctctctttcttgttccctacagctggtgaatctgaattgaatccttagtaaagtttcatattaggtgatttagtagatgctagttaaggaaaaatgatgatctctaagaattagcctgattttattaaaaaaactttgtggagattaacctaatttccttcttcttaggaaggctattagactgttgatcacagcagacaggggtctgaatttcatgaagttttttgacatggtccatcatgatatcactgtgggcagaatggatgagagggatatgatataaaaatacggttatgttgttatgcagctggctgaacagccatctgaaagagtgatatttaatggtctgtgttaacctggaaggagaactctgggataccataggaatctgtcttcaccttcattatatatatcaacaaagagttaaaagaaatatagctggcctactaattaaatttgtagataatatacagttgaggaaggatggcttaaattattgggtgatatagacaggagtcaaaattattgggtgatatagacagtctcaataaacataggagtgcagatatctctttgatatagacaggagtcaaaaaagctctaaaaatatcaggatgataggcttaaccagcaagataaaatttactgagaacaagtttataatataatatataatgctatgtattacagaatagaggagaaatggcttagatgtaggggtaggaaaaaaggcttaacgttcctaagttaacagaaaacttaatatgggcaactttgtcatgtttctttcaaaaaaatgcattgtgatcttaggaatgtctagaacattaatagaatgtctagaataagattagtagtagtcccgctttattctatgcatcggactattttgttctgattatcgcagtctgagagtgataagcttcaagcacatccagaagaaaatggctaaagtttttcacataacaaagctacaaaaagaagcctataaggagtcataatagctgtctcctgatatttgatgggcaaccctttggaaggaaggttagaatgagactgtgaagctccagaaggtaaagtgacaaccaattgttacatgaagatggattttgactccatataaagaatatttgtctggtccttaaagctgtctaaaaaatgaaatagactgtgctgggagttaagtagtgaattttccagggtgttgccaaactaccttaagggtatgtggtaatagaagaaatttattcatcagaaagggggtaaaactagttgatgtttagattcagtctactctttttggtggtgtgtttcctacttgtttataccaatttactctctgtcgtttggctaagaggcagagaatgtctttgaccataaattgataaacaggattcatctgtatatgttattatcaaaacatgcctgttacttttccaagaagctttattcttatctactcctaaaatatctttatgaagwtaaaaggacttaacataagtatttagaaggaaaaatgttttttttttctaggaagcattatttatatttggcacttttttattagtgtcaaaaacaaggtgatcacactgcagctataagaagatagtgctatgaaatgaatatgtgcagatacatcagagtaaccaggttcattggtttgttcactcatttgttttttactcattcattaatttataaatattttttcggatacctggtaagtgctggtcgctctgctaggtactaggaagttgatatatactatagtttctctgaccatttacctaaaaatctgttaataggctccatttcttctaatcatccaagaaacatttttttaatttttaatttttgttggtacatagtagttctgtatatttatagagtacatgagatattttgatacagatacacaatgtgtaataatcacatcagggtaatcatgcttgagggtatggataccccatcttttagttattttaaaatgtacaaaaaattattgtaaactatactcaccctgttgtgctatttagccctatattttattaattctatctaattatatttttgtagccactaactatcccaccctccctccatcccgctacactccccagcctctggtcaccatcattctactctctatttccatgagttcaattattttaatttttagctcccacaaacaactgataacatgcgaagtttgtatttctgcgtctggcttacttcacttaacataatgaccaccagttccatttatgttgtcacaaatgacaggatctcattcttttttatggctgaatattactccgttttgtgtatataccacattttctttgtccattcatgtgttgatggacacttagggtgcttccaaatctcggctgttgtgactaggtctccaataaatatgggagtgcagatatctctttgatttactgatgtcctttttgtggatgtatacctagcagtgggattgccagatcatattgtaactctatttttagtggttttaggaccctccaaactgttctccatagtggtggtaataatttacattctgtcaacagtgtatgagggttctctagtaaacaattattactttgttttttgtgatgtaacctctaaagacaagtataaaagaaacactggaaaatactgatttttaacgctgtatgctagctattctaacaactatatgttaataacttaatatataactgttagtatatataataacagctgtattataactattaggtatccataaaaatatcatgcctttatgtactttaatattaatattgctttgaaactgaatgctgaggtagaatttgttttttcaggtttctgtttactgttaagagttttctatattttcttccttttccttttttggactgttgttaatttccatattgctttttgaaaggagaaataagatattgttaaggggcccaaaaatatacactaaccactgtttttttcaagaaaaaaaagccatttttttctcttagataaatattttttagctggttttaattttaatgtgcatcattgctaggtaggcaagaatgatcttgaaaaagaaagcttttgtaatattaagccaacaaagacattgcctgcaggataaatgaatagttgaacatattcactggttacatggtcaagttttatctttaacttattttaatataagatggttactatgtttcatattaagagtgtacccttttaacagtaccttataaataattcttaagcccaggtagggtgagttagaagtatctagttttacaattagaaatatgaaatgagaaatcagtgctcctttgtatgactaagctcaagcaggatttaaggcagggaggggtcaccactgattgatcttcaaatcttaccatgtctaagactgttgctgctgccatttgtctttctctggttttctaggattctttggcaaaatgttagctccttttcatcaatcttcccatctgcaactgatgattttctctagcatttcccataatcatctcaagattgcagagaaatagaagagatatttctacactcatgtttatagcagtgttagacacaataaccaaaaggtggaagcaacccaaatgtcatcagtagatgaatgaataaacaaaatgtggtgtataaatataattgaatattcagcttttaaaaggaaaaacattctgacacatatacaacacgatgaccttgaggatgttatgctaagtgaaataagccagtcacaaaaagactaataatgtatgattccatttatatgtggtacctagactgcttagcagattaagggatcttcaggatttggagtataagacacactcggccgggcatggttgctcacacctgtaatcccagcactttgggaggctgaggtgggcagatcataaggtcaagagatcgagaccatcttggccaacatggtgaagccccatctctattaaaaatataaaaattagctgggcgtggttggcacgcacctgtagtcccagctactcgggaggctgagacaggagaattgcttgaacctgggaggcagaggttgcagtgagccgagatcacgccactactccagtctggcaacagagcgagactccatctcaaaaacaacaacaacaacaacaacaacaacaacaaaaagaacacactcacaataggatataactaagtcatctactccacatgtccaaaactgggaacttaggatctttttctcacacatttatccttgctccttccatcccaagttagaaatatggatgtcaacccatactgcttttttcccccctctgaatactattggagaccaagccctgctgattttatattctttttttttttttttcttttgagacggagtctctctctgtcacccaggctggatggagtgcagtggcgcaatctcagctcactgcaagctccgcctcctgggttcatgccattctcctgcctcagccttccgagtagctgggactacaggcgcccgccaccacgcctggctaattttttgtatttttagtagagacgaggtttcaccgtgttaaccaggatggactcgatctcctgacctcgtgatccgcccgccttggcctcccaatgtgctgggattacaggcatgagccaccgcgcccggcctatattcttcatttttaaaaaatctgccttctctacattactggtacaatttattcattcaaggagtacttaattatatagtattccagatggtgtcagttctgtgaaaaaagaaaaagtagggtgggatgggagtttgggagtgtgggaggtggggagagagttgcaattttaaaaatggtggtaatggtggtccaggcttggtgcagtggttcatgcctgtaatcccagcactttgggaggccgaggtgggaggatcgcttgagcccaggagctcaagtccagcctggggaacaaagtgagacccggcctctacacaaaattaaaaaattagctgggtgtaatggtgtgcccctttggtcccagctacgtgggagcccgaggcaggaagattatttgagaccaggaggtcgaggctgcagtgagccaagatcatgacactgcactccagcctgtgttgacagagtgagattctttctcaaaaaataacaacaataataaataaataaataaataaataaataaataaaagatgttccataacggtgaaatctcagcaaaacctgaaggaagtaagccatgagaatatttggaaaaaaggcttgccagatagagagaacagtcagtgcaaaggctgcaagatgagagcatgcttggtgagttcaaggaactccraggaagccaatagatctgaagtggagagagcaggargaagagccatgggaaatgaggtcttagaggtaacaatggtctgcttatgtaggggttttgtgaggcactgaatggatggatgcattgggcagagaagagacacctaatttatatttttaagagatcactggctgctggttgatactaggttgtatgagcaagggatgaattagacaagctaggaggttgttggaatatttcaatcaagagaaggtagcttagacagagtggtcagtgacagtggaggcagtgagctgtggattctagaatttggaagatagagccagcatgagtttctaatagattagatgtaggatataagagaaagagttaagataaatctacgtttgtttgtttgttttttcctgtgtaagtgcattttacatcaacttagatgggaaggaaggctgtgggtagaacaggtttagaggggaagaacaggacttgttaactttgagatgtatgttaggtatctaagtggagttattgagtaggaagtcagatatatgagttcagaatttcattggaagttaatttgggagttgtatgaaaatacatagtatttgaaacaaaaaactagatacaatccccaagagaatgaatagacagagaaaaggaacaagaacttagcccagggcatttcaacattaagaaatatggattcaggcaaagtaggggaaaagagggaaccaacaaaggagactgagaagaagcaaccaatgagataagggatgaaatcaagagtatagtattctggaagccaagtgaatgaagagtatcaaggaggagagagtgatgcattattgccttagtttaggtcttagtcacagtcacgtcctaaattatgacagtttactttggtctttcggcctctagctgcctccaaccccttctctatacctcatctttttcctattgtctgtgatcaaaatgttctttaaaatgaacacagatggttttctttctatttatgctgtttgtcatttgttgagatgcttttacctgttttttgatattttgtcaaatatggtaaatttttggccattaatttttcacgtactgtcctgccctctcagcctacccatggtactgtatttacatgtaagttcaaccagttaatactgttccacagatcagcgaatctttgctaattttatttgtcttttttctttctgtgcctcagtgtggatattattgtgtgcttcaagttcattatctttctcgtgccaaatctgctattaatcccattattaatagtaatatggaaattgtgaatgtgatgctgatgaatgcagaactctattgtctttctgtaaagaatgttgagctttcttctaggaagtagtttgagtgaattgtggatcagtacaacccttttgacacttgttagagtttgtccagagttgtttttactctagggcagtggctctcaaagtgtggtacctggaccaacagtatcaatgtcaccttggagtgatgcttagcaatctgtgttttaatacatctctaagttattgtgatgtactcttaacttttaaccttttacccctttagaaaatataagtgcagcttactgccagtgcttttttaacgttacataaacatgggtctttgaggctgaagcaaatctgactgattttcaatgtggaaataaaatataaaaactgttcttagagttatttttaaactgaactaacatcagaatcacctgaatcatcagaatcgtctatttcggaaaaattagattcagccaataactgtttgagaactgtgttaacatcatgtgtaggaatgstatgttttctaggatttgacatttttggtgattgagaattactacattttgtaaatggatatatcactaccaaaaacagaatggtacaaatagaatgatgtattttgtttccaaagttgatatactagagcaatgtgaaagtaataattaaaatgagatattacatggcaaagttatctcagggtaaacgctgcagccgcaagtgccactggtgagtattctctgggcagatgggaaaaggatcaagaaccactactctggagctagttcagccttactactaggatgtaacccttctggagtctctgtgcagtgctctagatattcaatgaggtctctctcctttaccttgtcaaaatgtctcacagtcttatatgagtactgggaattatttagattaacattcatggtactttgtttgttcttatggaatttactctatgtatgtgcagcttaattttcagtcatagtctcaaggggaaccctgtgtagatttcctgagctcttctctgcatagctcttcctctttagcactctgccctgaagagtccatctctttcctcctctttaaactctgaactctgtcaccctaacttagtaagacctctgtactctgcttggggttatcattccttgtggtgcattccagaaagtgcttccagacagacatcagggcgaccttgttcattttccttttctcagggatcacagtcttaacactaacttttgtctgaggtgtgacagtaacttttttgtatatttttccagttttttcagtgtttacagtaggacagatctggtactagttattctgttatagctggaagtccaggtacttattttttatggtcatgaggctacatagaagctcattatatgaggaaaataaatgctgtactaatttcttcacatgatttcaggcagcactagagtgctatatgatacatattaggcactgtgctagcataggaggattaaaacccaaatgggatagtgcctttgtcttcaaagatctcatgacctacaagagtggactggtatataaacaacacattccaagtcagtttgtgataaaggcagcatgaaattatataaaggccatagactttgaaatcagataggctttggttaaatcccaactccatgacttactattgtattatgcaacctctcacatctttagttttccaactgcagaatggagataatagtacgttataggacttctgagaaggttaaattaaaattcttttataaagcacttgacttggcatatcatagaggttcattaagtattaggtttatttcccgttagaatacacataggatagaggagcagttaatttttattattactatagaaatcttcagggaggaaatgatatttaaattgtgccttgaaggtggagtagggttttgatatgtgttagatgggttccaaggacattctacttttaaggaactaaatgagcaagggctcaaaggtgtaaaacgtggggaaggctgtaaatacacttatgaatgtcagcatagtccagaaccttaggaaaagcaatttaggtcttaaaaacaaacaaacaaacaaaaagacaacaaaaaactagtagtaggaatgtaaaaatgaagaaaaaaagaacaaacagaaagtctaaccccatagtaaaagtatacttccttaggccattcctatttattgccatgactaataaatttgggaatgcctgtggaaaattcctgtgggctgatcttttcttaaccactattcaagactgctttacgttgatagtctaagccgatcatttcattaatattaaactccagagctcattcccgagtttccaagaatttgctgaattgcttttctctgttatctgcttctttgggtaacttccatatttttctttcttgccctgtaaaaattgatttcctaggttttccaagtgattgataatgtgacagtactataaagacttttcttagactctggtatgttcgcatttagtacaaatactgtcaagggttttataaagtgtataactaatatactttctacatatcttttactagggaattctaaacttaagtattttatttcattgaggttaaaatatgtcctgttaagattttttttctcttttaaattattagtgttttgcattgttaaaaatcagctggcttcttggattgagtttanttcacttttccagtgggtaacttttatctgacctttaggtctgtaattgtttggtttgttttctgaagctatggaatgttttggaaaaaataagcctcatggagaagggctattatccctgaaaatgatgagaccggaaatgagaaaagcaaaaatcagatatcacccttgaccatgtggatttcagtttttaaaaagtctttatcctctgtctctgagaaccattatttggaagtctgtttctctgcctctctgtgataagttctcaccaaagatcctcttgtgtttttattagaattacatcgaattcrtaaattggggagaatttatgtatttataatattgaatcttttcatttatgaaaatggtttatttctctatttaggtattctataatattatagacttttgtcctcaaagatcttacaaatcataatttggttagatttattcatgggtttttaatagtttttaaaaaatgggatctgtttttattatgtaatccaatcagttcttggatcagaaaattgatttttatatttaaagtccarcaaaactgctttgcatgcttattaaaatggcttgcaaactatcgtatattttctatggaatcatatatgcagtagcagtttttcttctattccaaacctcatacttctttattcttgaatagaagtgtcatagtgggattttttcttattcctgatttccggagactccaatatatcatttttcattttagaaagtttatttttcttgctatattggtggaagcttttttcttaagtgatgaatcaatgtaaaattttatacttttttattttggaaatttctagtttattagggtcctcttttaatggacaaggcagtagagactcaaaaaggtaatggagtttatttatttatttatttatttgattttcaacttttaagctcaggggtgcatgtgcaggatgtgcaggtttgttgcataggcaaatgtatgccatggtggtttgctgcatagatcatctcattacctaggtattaagcccagcatctgttagctattcttcctgatgctctccctcttcccatcccccaccatccaaggccccactatgtattgttcccctccatgtgtccctgtgttctcatcatccagctcctacttacaagcgagaacatgtggcgtttggttttctgttcctacattagtttgccgaggataatggcctccagttccatccgtgtccctgcaaaggacatggtctcaatttttttatggctgcatagtattccatggtgtatacgtaccacattttcttaatccagtctatcactgatggacatttaggttgattccatgtctttgctattgtgtatagtggtgcagtgatcatatgtatgtatgtatctttataacagaatgatttatattcctttgggtatataagcagtaatgggattgctgggtcaaatggtatttctgcctctaggtctttgaggaatcgccatactgtgttctacaatggctgaactaatttacactcccaccaacagtgtaaaagtgttcctttttctctgcaaccttgccagcatctgttgttttttgactttttaataatagtcattctgactgatgtgagccattgtggttttgatttgcatttctccaatgatcaatgatgtggagctttttgttatatatttgttagctgcatgtatatcttcttttgagaagtgtctgttcatgtcctttgcctactttttaatgtttttttttccttgtaaatttgtttaagttccttgtagatgctggatgttagacctttgtcagacagatatattgcaaaaattttctgccattctgttagaaactataatcagcttgatgatagtttcttttgctgtgcagaagctcttcaattagatctcatttgtcaagttttgcttttgttgcaattgcttttggcatcttcatcatgaaatctttgcctgtgcctatctgctgaatggtattgccaagattttcttcttgggtttttatagtcagggttttacatttaagtctttaattaatctcgagttgatttttgtatatggtgtaaggaaggagtccagtttcaattttctgcatgtggctagccagttctcccagcaccacctattaaatagggactccttttcccattgcttgtttttgtcagatttcttgaagatcagatggttataggtgtgtggtcttattcctgggttctctattctgttccattggtctatatgtctgttcttgtaccagtaccatgctgttttagttactgttgccttataatatagtttgaagtcaggtagtgtgatgtctctagctttgttctttttgcttaggattgtcttgggtattcaggctcttttttggttccatatgaatttttaaatagtgttttctaattctgtgaaggatgtcaatggtagtttaacgggaacagcattgaatctgtaaattgctttggacagtatggtcatttacatgatattgattcttcctatccatgagcatgggatatgtttccatttgtttgtgtcatctgtgatttctttgagcagtgctttatagttctccttgaagaggtccttcacttcccttgttagcctgggtattttattttctttgtagcaattgtgaatgggagttcattcatgatttggctcttggattgcctgtttgtgtataggaatactagcaatttttgcacattgatttttatatcctgagactttgctgaagttgcttatcagcgtaagaagcttttgggttgagaggatggtgttttctaggtataggatcatgccatttgcaaacaaagatagtttgacttcctctcttcctattcgaatatcctttatttctttctcttgcctgtttccctggccagaacttccagtactacattgaataggaaaggtgagagagggcatccttgtcttgtggcagttttcaaggggaatgcttccagcttttgcccattcagtatgatattggctgtgggtttgtcatacatggcttttattattttgaggtatgtttcttcaatacctagtttattgagagtttaaacatgaaaggatgttgaattttattgaaggccttttctgcatctgttgagataatcgtggtttttttctagttctatttatgtgatgaattacatttattgatttgcatatgttgaaccaactttgcatcccacggatgaagcctacttgattgtggtggataaactttttgatgtgctgctggattgagtttgccagtaaaattttgtaatttttaatatctactaagataaatcatatggcttttttatcccattaatgtggtagattatgttaatggcttttgtagtgttaaatcatccttgcattgccaaataaactatacttagttatttaaaaagaatatattgctgtaatcccagcactttgggaggccgaggtgggcggatcacaaggtctggagatcaagaccatcctggctgacacggtgaaaccctgtctctactaaaaatacaaaaagaaattagccaggtgtggtggcgggtgcctgtagtcccagctactcgggacgctgaggcaggagaacggcgtgaacccgggaggtggaggttgcagtgagctgagatcgcgccactgcactccagcctgggcaacacagcaagactccgtctcaaaaaaaaaaaaaaaaaaaaaaagaatatattggtggatttttttgttactattttgtttaagaattccttgtagtttttgtttgtagtaccgatttttctttctagattatagaagaagctcagcagctttcttcattttctattctctggaaaaatttttataacataggattttctcatcatgaagatatggtaaaacttatttccacatcctccatacttgatggagtttctaagtaggagggcttttaaaaataatttataaattgaaatataatgtatttatgggaaaattgcacaaatgataaatgtagctgtagctcaatgaattttcacaaactgaacaatctcatgtaaycagaatccagatgaagaaacaaaaaattaccaatgtcccagaagcccccactgtgtgccctttcagccactgccttttctgagggtgaccacctactccagtttctaaactgtgtattttaggggggtttggttcgtttttgaactgtatacagatgaaattatacagaatgctttttttttggtatatggcctttttcactctgtagtgtatttgtgagattcatcatgttgtattgtgtagttgtggttcattctgtttgctgtgcagtatactattttgtgattattcatacaatagaacatattacatatttatgtatccattctaccattctactgtgtgtgtgtgtgtktttttttttttttttttttttttttgagacagtgtctctctctgttgcccaggctggagtgcartggcagatctcagctcactgcaacctccgcatcccacgttcaaacaattctcctgcctcaggctcctgggcagctgggattacaggtgcatgccaccacgcccagctaatttttgtatttttaattgaggtggggtttcaccatgttagtcaggctgatctcgaactcctgacttcatgatctgcctgcctcgacctcccaaagtgctgggattacaggcgtgagccaccatgcctggcccattctactgataatggagttttgcatgccttctagttttagcctagtgtaaatagggctgctatggacattttggtggacttatttgcacatttctttcaacctaggagttgaattattgggtcatcagttatgcatgtatttagcttagtgatgttgccaaacagttaagttgttgaactaatttatattcttaccagcagtgttggagtactggttgctgcacattcttgttgggcttcgtatttaactactatattttagctactctagtgggtatattgaataacatgtagtatgctgttaacttgcctttctttgatgattaagcacattaaacacttttttcatatacttattggtyatttgtataattttggtgaagtgatgtattgcttctcgacatgctataaagaaatacctaatactgggtaatttataaagaaaagaagtttaactggcttatggttccataggctgtacaggaagcataacggcttctggggaggcctcaagaaactttgaatcatggcaaaagacaaaggggaagcaggtgcatcttacatggcaggtggaagagagagaggagggatgtgctctacacttttagcaggaggaagagagagaggaaggaggtgataacacttttaaacaaccaggtgtcgtgagaactctatgaggagaacagcaccaaagtgatggtgctaaaccatttatgaaggatccacctccatgattcaaacaccttccaccaggccccacctccaacattggggattatacttgaacgtaagatttgggtgggacacagatccaaaccataccaagtgcctactcaagtttttgtccatttgagttgtctgcctttttcttaatgacatgcagaagttctttatatattataaataccaattctttgttgattttatgtactacaactagcttctctatgggtatatttttattagttactcagtttttaaatagttatccaaactttctatttccttttgagatctttttaataacatttttccagaaagttgttgatttatcttaatttttaaacctactgataaaaagttgtttaatctatttttggtatcctttcaattattctagaaaattattagttgctatcgctttaaatattgcatatacaagtatatatgagkatgtgtgtgtatttttaatataactggtagcatactttacatactgttttgtaccttattttcttcacttaatatttcttggaaatccttgcatttcattatataaggagtgcatcatttaaaaaatactttcatagtatttaataatattatgtgataatatatttacccaattttttattgataggaatttgaattactgctagtcttttgctgtaccaagcaaagctgaaattaggataaatacataaagtggaatttctggtcttataaactcctgggctgatgatagagtattaacttttatgtttatgttccatttttaatgttttaagtcttttagaaattgagatataaatgacatgcaataaaattcaccattttaaagtgtacagttcagtggtttttactttattcatggagttgtgcgatcactaccagtatataactccagaacattttcatcatcccagaaaaaacccttagtagtcactccagattcctgctttcccccagctcctggcaccctctaatctattagttttctgtcactgtgtattcgtctattctggacctttcatataaatatagctatacaaatgtgatcttttgtgcttggtttcttttacttagtataatgttttcaaggctcatctatattacaacatgtatttatgcttattttcttttatgtatggtcaaataatatttcagtgtatggatataccacattttatttgatggttatttgactcagttttactttttgtctattatcaatagtgctgctatgaatacttgtatctacgttttgtttggacatgtgcttttaattctcttgactctatatctgggagtagaattgctgggttctatagtaatcctatgtttaactatttgaggaactgccgaactgtttttctcagtagctgcaccattagcactgtgtgaggttccaatttcttcacacttttatcaacgctttttattttccttacaaattaaaaaaaaaattatacctgctattctaacgagtatgaagtggtatatcatggttttgattttcattttcctaatgtctaatgatgttgagcagattttcatgtgctgattggatatttacatctcttctttggcaaactgtcttttcagagcctttgcctcttgtttaattgggtaatttgtctttttattgttgagttgtaagagttctttatagagatacttatattatgtgtgttgataaagggcaaatatctccatatgaagtgttcctttatgttaatgagagtaaaaatgctaacttccaaatagaaaaatggccaaataatacaaaaaggaattcacagggaagaaaaacaagtagctaatagtaaaaaaataaagaaaaagcaaattacattactgaaataaatgcaaattggaatgatgacttttttgcgtattatatttttaaaaatatgattttttttgtgggtgagtatggggtgaaactctcaggtaacataggaaatgtaaattgattacctttgtagaggatatttggcaacattataaaattatatagaatatgtctatataatttgaatcagtagttttacttcttggaattttttctgagaaaataatcattattttgcatatagattacatacagtgatactcatgccagtatcatctttaatggcataaatttataatcagcaagaggatggttaattacatatagtacaatattttaccattgttaaaatttatattttaaaatatagacaaattgatcttcatataatgttaatgttaagtgaaaagtagtaagatacaaagctgtgtaaaatgtatgataacaattcataaaaagcaacattcacccacacaaaaacctccaccaccacacacacacagaaataagagtgaaaataaacattccatcatattgacagtgattaccttcgggcggtgtaattaaggttgatatttattttctcctttatgtagttctgaatttcccagatttttaagattaaatatgtattgctctctaactagggaaagaagtaaaataattataaataagatagattaaatggattattatggtgcagtgagaccttttcccattggccctgggattttcttcctttggtttatgagtttaaagtgttgacagttgtgaactagtttgctaagtgataggaagcagtgttgaaatgaaatactttaaatcctgaagatttatgaggaagaaaatacttgggcaaatagtgtcaatgagtcctgatacgtattgctaacttgtcactagttcactttacatctgtgtagtgataactttgttttttcctccctcattgattatagtctctcatcccaccatttgccaaggccgtgtaaatagtttgctgtcgtagagatacgcagcaggcccatttgagtagttctctttcactctgatctccttagaaacctatcacttttacctttaaatgatacatttttaaaaaactattgttgttgttgaatgggatttccctaaataagaagagccatctccctagtttcaggattgtggcttctttaattgtaatggagttttaatattatatctacggtggaaatcagagtcaattcaatcttattttgcatcccctgtatgctatcatactgattaggggtgtaacaaagaatggactgtgatttttgccattttgtggttttcactggagattttatagtacagagggagagaatggcatagtaaataaaagaatgagcttagaagtgagactttgtgggtttaaatacctgctctctaatttatcagtttgtatttaacttctcaatatccttatctgtaaagtagaaataacagcactatcattcatcactttctatttccttatctttttgccttttcttcatggaagttttcacttccaagacattatgtttttcttcatttatttacagtaatgtaaaatcctggaatacatgtacctttttggttcactcatgtatttttagtgtctagtgtagggtttgctacataatagctcctaatattcgttccttctactgggaacttcttccaacatgaatatccatatagcttatccccatgctttatttagttccctgctcaagcatcacctcactagagagaacttgctagacgacctcttctataaaatagcaccctttagttttctctattttttcctgctttatttttcttcataatactttactgactgctaagtagtaacatcaatttatttttatattttcgagtgccttgcaaaaattagggtcttcataaatgtttgtttaactgaaattaattatcttagactattctatcttattctcatatgtaataaattaccagcttgtgactgtttatttctaggctccttcaacctattcatttgtttctatgcttatttccacttcttttttcactacactaattcagttaactgccacctgttttgtgaacaattgagtagtttctcaattttgttttgttttcctccagttcctcaacctgcacaaaacatctagcttactgctcttcaaatatgctattatcatttcattctttttcaatggcttcccataatccattgaattaaatgatattcaaatctctttatatctaattggaacctacctttccatagcactaaggagagttgtaaggaggtgagtacttggtgtaaaaattgcttatagatgtagttagcttgctatgagattaaaatgatttttaaagtacagagaaaaataagaaataactttaatgcaagtcaatatataatcaactgattatacgtgatttagtccacagatttatagaaattcagataaaaagatcattgaaaccttggctcatcagagagagcttcattagaaaaactgatagttgtttggggtcctgtatcatttattcattttatttattcagacccaatttctccctgtttttctaatacaaatatataagattttagagtaatggattctgttttgttaatataaaaatatttcttgtgtcagaagaattcagatgcttatagatattcttgtaaaatgttattatttttaatgagattgggtcttattccattactttgaaaatgtatacaactgagctgtttcttctgatcagcttatactatggacacttagtttgaagtcatattggaataatttggagaaaggtagaatttagtagatattacagaatttaggtatctattgtaaaatttaggttttatatagggcatgacattttttaagcgaatttataataaatagggctttttcaattatacagtaatgtaggttccaaagtgctattttgtgggttttctgtgtgtttagctgttttgtctgtacttatatttgtatttgtattgtacaaaggatataagtttctttgtagtttggataatcttttggatgaaagaaaggtagtgagtcatacaaaatagtgaaaaaaatcagatattttgaaataatacttctaattttccaaggatttaccaaaatagaggatgttaatttttagtatgaatttttaatgattggattggttttctgatgactgttttaattagttctgcagggcatcccatttctatcaacatagtgtgtgcaacaccttatttaccagtaatcaactcatatctactctcagtctgtaaagaggggtgtatatgaacctttacttgttattttttacttacgtaaatttatttacttttacattcctggtcaaagtgaataaacattttttatacagatgagttcatttcctcactcccatatccattccagtttctaagagccttctgattaacaggctccccaaaatttttcccttccaatttaaatttaagtaattagctttttcctaatttggaaccttggttagaaaacacatttgtttgatttgtcattagtttgggcatcttacttcaaatgaggtcatgtagctttgagtttagatgatcacagaagtgttcactgagcagcatcttcgtagctttgaggaaacagaaaaacaacttttttctactttgattatgattctttttgacagttgctttaactacagttaggtactggctgtaccagttccagtttaaacaactggactctgaacctgtttttgttctgattaagaagtttatttatatgttcaggaatacagcggcacaacctgttaacagctgtaaatttgcttgattaagctgtgtgtagacaaatttactagagggaactgttccctaaaaattccagttcacttacatatgaagttagtctggctgtttctcaccagtttccatcatttcctgccaagaataataaacattttcttgcaaagcatcgacactaaaggttagaagtgttcagtgttttatcaatcacactgggctgtcatgaatctcaataaacaaacacagagatatctatgtggatgcctggagaagccgttagaccctagaaaaataatttctttcagacagtatcctagaccttttcaaagtagataaatgtcaattatgaagagacatttattgtaatggaaataatggattcttcggtctagattttcatttactgacctagttcagggaagcttgtacttttagtggataataataagctagagcaagaaagtgtgttttcttaatttcatataactgtagatgctattatgagtattataataaagatgggtttattaatttaaacttatagtattaacatttctctaccatggtctgtcaggcaaactgtggctcacgactggtgcacagcgtgttattgtagcactcacaagttaagaatgggtttatagttttaagtgattgtaacaaacataaaacaaagaattttatatatatatatctagagagagcgagagaggagagagagccctcaaagtctaaaatatttattatctggccctttaagataaagtttgccaaaccctggtctatattagtagtaatagtttactaccagcattcaaaacgtgccagcaacaaagcaggatgaaattatagtcttagtgttagggtattttatttcttatttagtgttaggatattttatttcttatttgcatgtggtatataaaataaaaatataacagtatccttatagggttattgggagcattaaatcataactttttgtggtgcttcttacacatggaggacaataactgttttgttagctgttgctgttgttatatgtcagatgcctgacagttgtttcaactttgttttatgtgtgtatcttctgtttattctctgctctatttgcattatgtttaattttgtaagtcttttaaaaatctttttgattttagttgcaatgcaaattttaaaagtatagcagttttattgttcccattcctgtggctgtgtaacagattaccccacaacttagtggcacaaagcaatcagttattatgctcacagattctgtgggtcaggaattcggacagggcacagcaggaatggcttctcttagttccacagtgtttgaggctggaacctcaaaggctaggcactataatcattcattcatttatatgtctggcagatgtcactggctgttggccccagttcctctccacatgggtctttccatgtgatgtctccaaatgaactagtttgggcttccttaagtagagtgtctgggttcctcagagcaaacatttcaaaaagagaaagataggcagaagctatatccttcttatgacagagccttggaagtcacagaacattatttctattttgctctgttggccagaataattagaaatccccctaggttcaagaggagagaaatagactctaccatgtgatgggtggggttggcaagattctggaagagcatgctggaccagaaatacggctgaagccatttttggaaatatgatctgccacaatgatattactttatttaataattgcttatgtagcatttaatctatatgctagggactactgtaaatactaaacaaatattaattcatttaatccataacagtcttattttacagatgaggaaactaaatcagaatattgtattacgtagaatataactttctctgctcttgatggacaacaaataatttactatgattttaaaaacttgtctagtattatttaaacattaaatattttggatgcaaatttgcatttcctgcatgcatcatattagaatagacttgagaggtgcagtttctattaagtaatgtcttaaataagtacaaaggtcaggcatccaggagctcatccttccatattcttagaattgggatgtgataaataagtcagaattttttcatgaagcagtgcccagatgagtacatgttatcaaatattttatttgataataatgcaggactgactgaccaaacttgatttataaattagttccatgtccttttatgagaataaatacaatatcttggtcttgttgtgataatattacctaatggctatgttttccttcattggcattgaaatcagaactgatttttggtaaggttagtaatttgcgttatttttaaatctccattattatgaagatattttatcagggacaaagattgccttttctctctccctctccttttcttttctttctttttttttttttttcccattaacagttgatggaggaaggtaactttgtatgagttattgttggacatgcaagccctgtttttttacatttgttgattctgctttggagatttatcagtctctgagcaagttgctttgaagcatttcagtcttctttgtctctcagaacccattagtgctatcttcaggatgtgccagagtgacttttaccctggtacatttgtgacacagttacaccatatctcctactctctactcatcactgtatagcaagtacaagttaccagatagaagcatattcttgttggattatcaaaactcaggtggagtgtttaacatcttttttgaatatttaaatagtgtttttctttctaattggcaaattttgggtattctttaaaaacaatatttgattaggagatcatggagaaatttgtatggtcaaaacttgccaaatttgagactcacttatttgtttaaatttaaggatcagtaaaaataaataaataaataaataaataaatgtaggaatctaagatagagacctgtactattctgaatgtgaatgaactgattacattgattggaatacgtaatttaggagcattcattattactttttgacttggaaacaatataagaatgaatgcaaaaaaaaaaaaaaaaggagcatgtggattcattgctatcttgtttactgctcagtcacttatttgagagtgccaaaccctacccactagggccacccgggatgctttgtttatttgagagggggtgtggaggcatggtgaagggcaggagctccagagttaggctgactgggttttaaacccagccctcctgccatctgtgcaatcttggtccagttacttaaaacactctgtgattcagtctgcttttctgtaaaatggctgagttttctcattggtagaaatggcatctacttcatggtgttgtaaacattaaatgattaaatatatgtaaagtgcttaggatagtgcttagcacattataagctcataaatgtgcgctcctattcattaaatcattctttcattcacttattaaaagcatgacatttatttaacacctactatgatggggatacaaaggtgactactcaggagatatgaatattataatagggggaggcagaggtatattatagtcattacaacatacgatggtgtattagtctgttctcatgttgctaataaagacatacctaagactgggtaatttataaaggaaagaggtttaatggattcacagttccacatggctgggaggcttcataatcatggtggaaggcgaaggaggagcaaagtcatgtcttacatggccgcagagaagagggcgcgtacagaagaactgccctttataaaaccatcagatytcgggagacttattcactatcatgagaacagcatgggaaaaaacctgtccccgtgattcaattacctcccactgggtccctcccatgacacgtggggattatgggagctgcaattcaagatgagatttgggtggggacacagccaaaccatatcaggtggagagtgatataggttataaaacaaatatgtcaaagtgccatgaaaagaagaggacaaaatttttgatagccttaaacaatcgtttcacttttctctgacaccatttattcatttataaatgccttaccttttatggaacttttacagttcttcagcaggaaataatctctcctttattggcatccctatatcattttgccttatggcaattattattttctatctttcttttggcagctgttgatagtaatcattttgtatcttgttaaatcattatttgttcctatcttgtccattttacttgaagacagttcacagtcactcaacacagtacttatcaaaaatgcttcaaaaatatttactgagtgagtcaggtaacaaaacgattaaaatgcttagccatcagcstatgcctctrttttttaagggctttttataagcaaatacgggtagaaaaacattggcagtttgagagtaaaataaacatatataactcaccaactgactgatcaggataattatctgggagtctctgggggtaaaaagcccccagtttgttccattttacaactcccaccatggcctcagtcaggccaccaacatgatacaactagatgtggagtttggaagggtgtgcactggaacaccatcatatagtaatcctgccaactggatacaatagtgtaagcaaccccaagagcacagataatagtaaaatgtccaacatatttaacaaatgaggtgttttgagtatttattatctttgttttaatataatttttatttattggtacatttataacatttagctttaaatgatggctgtgtttaacaactggcttagaaaattcctgaaaatttagtagtcagctcttgtgaaagagtacaagccaactcacatacacttttacccaggctctgctgactgtgtaacttttgctagtaatttcactcctagaatctgtgctaaggaaattatctgtgaattggaaaaagcacaaagatgtttatcatagcattagtagtaacagcaaaaagttggaagcaacctaattgtttaaagtgagctgtggttaagtaaattcactggaatgttttctggaattaagtgacttctttgaagactttataacaacaagggaaaatgccataaagttaaatgaaaaagaaaaaagaaagaatgctaaatatctaatttatatagaatgatcaaaatttaaaaatatagacatatgctaatggaagaaggaaatgtcagtgtttggagctaataaggacatggctttttttctttaaccctttcttcattttccaaatttctaataatgagtatattttataattataatgaaaagatatatcatttttgtcacaaaaccaaattctaatttatagctctagttttttgttgaattacaaggcattatcaaaataaatcttttttattttattttttttgagatggaatctcattctgttacccaggctggaatgcagtggagtgatctcagctcactgcatcctccacctcctaggttcaagttattcttctgcctcagcctcctgactagctggaactacaggcacgtgccaccatacccggctaaatttttgtattttagtagagacaaggtttcaccgtgttgcctagggtggtcttgaactccggagctcaggcagcctgcccaccttggcctcccaaagtgctaggattacaggcgtgagccaccacacccagcctatcttttttatcttagaaatttaatattttcctctaacaaccaatagagcatataccaattgaatttgttttttagagatcaatgctgagttcattttgcccctagattttatttacagtctatcatagattttcatggaggattttaaagtttgaatttttcaaaagtatcctacattacaaaataaattttaggccaggcatggtggctcatgcctgtaatctcagcactttgggaggccaaggcaggcagatcacgaggtcaagagattgagaccatcctggccaacttggtgaaaccccatctctactaaaaatataaaaattagctgagtgtggtggcacgcacctgtagtcccagctactcgggacgctgaggcaggagaatgacttgaacccgggaggcggagattgcagtgagctgagatcgtgtcactgtactccagcctagtgacagagcaagactccgtctcgwataaataaataaataaataaataaataaattttaactgcagaattacctatttaaaaagctgcttagtagttaagtagctgattgtccctttaaaacaattgatagttatattgttctaaaattgagtctgggtctgtgtgtcccacattcgtgtctaagctatgcattgttaaaattttatttgaccatttatagcttgtctcactttgtgaaggaatttttcagaccttttcaaaatacatttaaatataagcagataatctaattttacacacttcctgtcccctttttaatcagtaattggttaacttyaatagacaatttagacaagctaagcttctgtgtaatttttctccctaaagattaagatttgatgaaataaataatctgtagcgtaccttgtagaaggaaaatgctttcctaattactttttaaaggtactaatttaaatgtcacagcaagttctgttaaggttttacttctattttaaggttgtaatatctgttaccactctatttacttggtgtgggcgagtttcaacaaggattagattttttaaattaattctctatatttttatgggggagaaattgaagcattccattatattgtaggaattcccggaacttcttagtattccttttctaccttgttaaaccattaatttgtttctatcttattcattttacttgaagacttaaacatttctgtatcactgacagccactcaaacagtactcataaaaaatgtgtcataaacatgtactgagtcaagtagcaaaaccttttaaattattcagctttttatgtgtctggattttgagtcatagacttgtgtgtgccatggggtataatgaatgggtaatggactttggagtaaataagcctaagttcaaagtctgattcttccatttaccagctgtgaaaacttgggtaattattctttgggcctcagacgcatctctgaaatgaatataataatccctagcttgtggagttgctgagaggattagagataaaatatgtaatgttccttgcatatagtaagcattcaatacatggttagttattaggcattcagtaataattgagtggatgactgcttcagggaaaatttggtggctgatttactgaaacacccagtaaacatatatgaaaaaaaaaaacacaccaaaactgacttttagttagaacagtttagagaaactgagagtcagtttataaaggagccttgcaaggaaactgaaaaggtgaaatagacgggaacaaaacctacagagtaccgctgcagtggagaaaagaagtttcagaatgctagaatggtggcagtggcaaattctatagtgaattcaaacaagaaggtcaataattggtcatctctggatttggtcacctttgttatttcccaatttctgtatattctttttatgatcatggttgacaaaagtatagcgctgaacataagacatgctaggaaggaaaatgatttaggaggtacagttgattcttgaaaatcatgggtttaactgcatgggtccaattatatgtagatttttttcaagcaaatttccattgcaaatacagtatttatgagatgcaaaacctgcatgtatggagggctgacatttcatatatgtgagttccagagggtggactttggaacttgagtgtgtgtggattttggtatatgtggtgcaggagtggccctggatccaattcccagtatatgccaagggatgactgtgattttatcagttaagattaggatgactgcgtataacaaaaaaagagacatctatcttatttcttgttcgttcttaccgtattgccacattgtccaatatggctgctagagattcagccattgcatcagtattacagctggcaggaggagaaaagaccaaaaagaatgtgccccttccctgtaaggacatttctgggaagttacacattgcactttctctttggctaaaatttagttctatggccacagctaactgcaagaatgacaaccagaaatattgtcttttggctgagcatagtgtacccagctaagctttggggttcttatttttaggaagcagaggaaaattaccagatcataacaaggtgatgagcatggcctctaatcctgcttttcttttctttctttttctttaacggggtctcactatctcacctagactggagtacaatggtgcaatctcagctcactgcaacctctgtctcctgggctcaagcaatcctcccagctcagcctctcgagtagctgggaccacaggcacgtgccaccatgcctggctaattttttatatttttcgtagagcccagggtttcgctatttgcccaggctggtcttgaactcctgagctcaagcaatctgcccatctcagcctcccagaatgctaggattacaggtgtgagccattgcaccagcctctttgcttttttaatgttttaactctcagcgtcttttaaaaacatcacttaaagttactttaaaattacactagaaatacacttccttttagaaaaaattaggaaatatagaagactaaaaaataggaaaaaactacctaaaattgtccactattaacatttttggtgtatatctgttcagactttttctgttaatatgtaaatattcatattacttatatatatagagtttcagtttgggatgatgaaaaggttctgagatggatgttgttggttgcgcaagactgtgaatataggtaatgctactcaactgtacacttgaaaatggtttaaatggtaaattttatgtatactttactgcaatttaaaaaacattgattgtttacaaaaaggagatcaaactcaacatattattttctaatctgctttttagaggtaagagaatacctttccatgtaaaaatatatatgtttgcagcatgatttttgtggctgaatatttattttatcctttaggtgtaccaccttttattgacaagagtgttgaagcaaataaacaggagtgttagttctttccttgttaagtggattcacagagagctttgtgatgcatgagagaggacctggggaaataaccagatgatggaaactgaatacccccctgggaccttacactgtgtctgccttgttcaagtgactctctaaataaacagttttactgctctgaggacaatatagtacccttttgtttttttcacatataattattatttttagttcatctaaaagaatgtcccaactaagttaatgttctattagaggactcagggcaaaagagagggataaagggagaacattgcctcctgagaaatgatgccttcacacgaggatcagatgccagtgatggcagcaatgtctgcaatttcgatattgctaagccactctcaggaaggtttttcctgattggaggtctggctctcccgtgagatggtgtttctcttacagccagaatgtttgtcattttcccatatcttcactgtcacagggtcattgtccttctaagtcttccctgccacttttagaacgtcattttttcacctactataaaatactctgcctctttgttatatgggtaaacaaattgctacctagctaaactaagtgttatttcttttctgtgctgttattgacatttgtcccccaactcccttccactttactcttcatcttatttacaggcataccttggagatattgtgggttcagttccagactgctgcaataaagcagttatagcaataaagtgggcaacacaaaattttttgtttcctaatgcatataaaacttatgtttgcactgtacggtagtctactaagtgtatcatagcattatgtctaaaaaatgtacaagccttattttaaaaatatggttaaaaaatgttaacaatcatctgtgccttcaatgagttgtaatctttttgctggtggagggtcttgccttgatgttgatggcttctgactaaacaggctggtggttggtgaaagttgggtagctatggcaatttcttaaaataagacaacaatgaagtttgttgattgactcttgaatcagtttatttgcttggtaataagagtagtacccaataggtagtttttcaacctatactcctctccattcctcccacccctagtagtccacagtgtctattgttcccatgtttatgttcatgtgtagtcaatgtttagctcccatttataagtgagaacatgtattgtttggttttctgttcctgcattaatttgcttgggattatggcctccagctttctccatgttgctgcaaaggacatgattttattcttttacatggctgtgtagtatttcatggtatatatgtaccacattttctttatccgatccattattgatgggcacccagattgatactatgtctttgctattgtgaatatcctggtgatgaacatatgagtgcctgtgtctttttggtagaatgatttattttctttcaggtatatccccagtattgggatggatgggtcaaatggtagctctgttttaagttctttgagaaatagccatctgttgttttttgacttttagtaatagccattctgactggtgtgagatggtatctcattgcggttttgatttacatttttctgacttttagtgttgatgggcattttttcatgtttgttggctgcttgtctctcttttttttttcttccaactcttatttcaggttcaaggggtacatgtgcacgttcattacatgggtaaattgcatgttgtggggtttggtgtctagataattttgtcacctaggtaatcagcataatacctaataggcacattttcagtcctcacccttctcccaccctccaccctcaagtgggctctattgtctattttcttcgttatgtcctggtgtactcaatatttcacttgtacttatatgtgagaacttgtggtatttgggtttttgtttctgcattaatttgcttaggataatggtctctagctccatccatgttgctacaaaggacatgatctcattcttttttatggctgtttagtattctgtggtatatatgcaccccattttctttatccagtgcattgttgatgggcagctataataggttgattccatgtctttgctattgtgcatagtgctgcagtgaacatacatgtgcatttgtctttatggtagaatgatttatattcttttgggtatatacccagtaatgggattactgggccaattgacagctctgttgcaggttctttgagaaaccttcaaactactttctacaatggctgaactaatttgcagtcccaccagtggcgtataaacattcccttttctccacaatccacaatctcatgaacatctattattttttggtatgtcttctttttttttgagacagtctccctctgtcatccaggctgsagtgaagtcctggctgactgcaacctccgcctcccaggttcaagcggttctcctgcctcgcctcctgagtagctgtgattacaggcgtgcgccatgaggcctggctaatttttgtatttttagtagagatggggtttcaccatgttgtccaggctggtcctgaactcctgacctcaagtgatctgcctgcctctgtctctcaaagtgccaggattactggtgtgaggcaccgcacctgacctgctttttggtatgtcttcttttgagaagtgtttgttcatgtcctttgcccattttttaatggggctgttttttgcttgttgaattgtttaaattccttatagattctggatattagacctctgctggatgcagagtttgtgaatactctctcccattccgtgggttttctgtttactctgttgatagtttcttttgctgtgtggaagttctttactttaattaggtcccacttgtcaatttttgttgttgttgttgcatttgcttttgggggcttagctaaaacttctttgcccaggttgatatcaagaaagttattttctgggttttcttctaagacgtttatagtttgaggtcttacacttaaatatttaatctaccctgagttaatttttgtatatggggaaaattaggagttcaatttcatttttctttatatggctagccagctatcccagcaccatttattgaatagggagtkcttttcctattgcttgttgtcagtcttgtcaaagatcagatgattgaatgtgtggctttatttctgagttttctattctgctgtattgatctatgtgtttttataccagtaccatgctgttttggttactgtagccatatagtacagtttgaagtcaattagtgtaatgcttccagctttgttctttttgcttggtattgctttggctatttgggctctaaaattctatatgaattttagaatagttttttcctaattctttgaaaatgacattggtagtttgataggaatagcattgaatctgcagattgctttgggcagtgtgaccattttaattatattgattcttccaattcatgatcatggaataatgtttcttcatttatttgtgtcatctctgattttttcagcagtgttttgtagttgtccttatagagatctttcccctccttggtttgatgtattcttaggtattttatttactttgtggctattgtaaatgggattgtgttcttgatttgattctcagcctggatgttatggttgtatagaaatgctactgatttttatacattgattttttttaaaatcctgaaacttttctaaaactgtttattagccctaggaggcttttggcagagtcttcagggttttgtaggtatgaaatcatattgtcagtgaagagagatagtttgacttcttcttttcctatttggatgcctttttatttattttttatttttttgcctgattgctgtggctaggatttccagtagtatgttgaatagtagtggcgagattaggcacctttttcttgttccagttctcaaggggaattgtttcagctcatactcattcagtatgacattggctgtgggtttgtcatagcttttattattttgaagtatattcctttggtgcctactctgttgagggtttttttaatcacaaagggaagttggattttattgaaagctttttctgcatctattatgatcatattttttgcttttaattctgtttatgttgtgaatcacattgattgatttgcatatgttgagctagccttgcatctcaggaatgaagcctacttgatcatggtgtattaaatttttgatatgctgctggattcagtttgctagtattttgttgaggatttttacacctatgtttatcagggatattggcctgaagtttgctacgtttattatgtctctgctagattctggtatcaggtaatgctggcttcatagaatgagttatggaggagtccctcttcctcaattttctgaaatagttttagtaggattggtaccagttcttctttgtatgtctggtagaatttggctgtgaatccatctggtctaggctttttttttttttttttttttttggttggttggtagggtttttaaaattattattattactgatttaatttcagaactcagtattggtctactcagggtttcagtctcttcctgattcaatcttgggagactgtgtgtttccaggaatttatccactttctctagatcttctaattagtatgcatagagttgttcaaagtagtctctgaggatctttcgtttttctgtgggatcagttgtaatgccatctttgttatttgtttactaatttgatctctctcttttttgttaatttagctagcagtctatcagtcttgttgattctttcaaagaaccagctgttggttttattgatctttcgtatggatttttatgtctcaatttcattcagtttttctctaattttagttatttctttttttctgctagctttgagggtgtgttttttctgttagttgtaaagttagattgttaatttgagatatttctaacttcttgatgagggaatttcgtgttataagctttcctctcaatgctgttttagctgcatcctagaggtttttggaagttatgtttctattttcattattatcatttttttatttctgccttaattttgatgttcacccaggacttattcaggagcaagttgtgtaatttccatgtatttgtgtaattttgagagatcttgttggtgttgatttctgtttttattgcactgtggtccaagagtgtgcttgatatgattttgaattttttgaatttattgatacttgctttatgatcaaacatatggttgatcttagaatgtattccatgtggagatgagaagaatatatattctgtggttattgggtagagtgttctatagatgtctattaggtctaattggtctagtgtcgaatctaagtctagaatttctttattagttttctgcctcaatgatctttctaatgctgtcagtrgggcattgaagtccccctctatttttgtttagctgtctgagtcttttcataggtcaagaagaacttgttttatgaatctcggtgctccagtgttgggtgggtatatatttaggatagttaagtcttcttgttgatgtgtaccctttatcattatgtaatgcccttctttgttcttctttgttattgttttgaagtctgttctgtctgatataagaatagtaactcctgcttgtttttattttccatttgcatgctagatctttctttatctctttacttggagcctgtggatttcattacatgtgaaatgaatctcttaacagcagacggttgagtcctgtttttatattcagcttcccactctgtgtcttttacatgggatgttcagctcatttacattcacggttagtattgatatgtgagattttgatcctgtcatcatattgttgcctggttttcatgtaagacttcattgtatagttgctttatagtgtatgtaggcgccatgcttaagggtgttttgtggtaacaggtgtcattctcttgattccatgtttagcactcccttataggcctcttataaggcttctctagttgaaatggattccctcagcctttgcttatctgagaaggattttatttttccttagtttatgaagcttagtttggtgggatatgaaattcttggttggaatttcttttctttaaggatgctgatagtaggtcttcactctcttctggcttgtaaggtttctgcttggaggttccctgctagcctgatagggttctgtctgtacatgacctgacccttctctctagctgcctttacaatttttgtcttttacattgactttggtgaatctgatgtctgtgtgcctcggggatggtaatcttgtatggtatctagctgagcttctctgtatttcttgaatttacatgtcaacgtgagattagggaaattttcgtggactgtatcctcaaaaatattttccaagttgcttactctctttttttctcactcaggaatgccagtgagtcatagatttgatctctttacatgcgctcatatttcttgaatattttgttcattttttaaaattcttttttcttggtgtctgactgagttgattcaaagaactggtcttcgagttctgggattctttcctcagtgtggtctgttccactgttaatacttccaattattccaattatgaaattcttgtagtgaatttttcagctctagaatttcagtttggttctttctgaaaatggctattttgtctttcagctcttggatcattttactggattccttggttgaggtttcaactttctgctgaatctagatgagcttccttgccatctagattctgaattttatatctgtcatttcagactggttaagaaccattgttggggagctagaggactcatttgtagttaagtggacactctggctttttgaactgccagaattcttgcactgattttttttctcatctgggaagtttggtgtttctttatctgtgatgcaggttgagtatagtcagttggcgtcatttctgggtattttcagagggtcaggactctgtacagggtctttgtggctgaattcttgcccctggtttcatggagttaggggggcatattaccaaaatatttttggtggtgtacttcaggctgtgatctggtagatggcacttaagagtaatgatcagtagctaggcttttattcatctgtgtgtcttctttgtatttcctcatgttgcagtcatgccctctgtcaccagtacgttggggagagagatgacctttccaccaggtttgcttctgggccttgggggagccccctctgatcactgttaccatgcctgcctttcttttgctaggtgttctgggccatgaggctctcttgggcagaaaccatggcagggagataggccacaccctttctatattgaccttgcagagggatgcatgccctgcttttatgccaacccagaaacccacacatctcaccccctcagtgctctgtgagtatgggctcctcctctgctccagtgccagccacataactcgacttggcactcccgagctgtccaccacagccctggggtgccgggactaacttggggctcatctgctggaccctcagagttgggttttggatattttgggggatctgaagtgctcccaggctgctggaaatgtactcaagaggagcagagcatccaggctggacaggagaggctgcactgcacacatgctcttgcagtggggggtcagggaggggccctggaaggagatggcaggcaagtggtcctgtagcacagatgtgcccccatgctggccctactttctcctgcctcagcggtcagctgggttagagcttcttggagggagatggggagccctgggagatgggtgtctatggctgtgctctgctggcctctcccacgcacagaggtccttggctccatgctggctgaagccctgattctgtctactccctgggcatatccctttgccagctcaaatatccatggtggatgtgggttcccctgtagctaggattccagaggtccacagtgatagtgtgcagtcccacagtctcttcattaaccctctcccgtggagctgttcagggctgggaagtagccctaggctttgggtagctcacacagggttcccagcttcctgtctcatcagtctcagtatctctgtcacatctccatctactttcagtgtttcttctctgaagatccgttcaaattgtgttggtttacttgaaattttggtctctcttgtggggagcagtgcttcttggcttcatctagtcagccatcttgtcctttttcaaactttttttaaaatttgggtcagtcctctgaaaccctgccactgctttatcagctaagtttatggaatattctaaatcttttgttgtcatttcaacagtgttcacagcttcttcgccaggagtagtttccatctcaagaaaaaaagtgttatccataagatagatccataactctttttggtaatccataagaaataaatgcttttctctcttttgttcaagttttatggtgagattgcaacaattcaatcgtatcttcaggctctacttctcattctagttcttttgctgtttttcccgcatctgcagttacttccttcactggagtcttaaactcctcaaagtaatgcatgacagctggaatcttcttcactcctgtgcatgttgctattttgaccttttccagcgaatcaggaatgttctgaatagcatctagaatggtgaatccttcccagaaagttttcaatttgctgtacccagatccatcagacgaatccgtatctgtggcacttacagcctcttgaattgtgtttcttaagtaataagacttgaaagttgaaattaatcctcgatctatgggctacagaatgggtcttgtgttagcagtcatgaaactgctattaatcccctggtacatctctattagagctcttggttgactgggtacattgtcaataagcaatactattttgaaatgaatctttcttctgagcagtaagtctcaacactggacttaaaatattcagtgaaccacactgtaaccagaggtgctgtgatctaggttttgttgttctatttccagtgcacaggcagagtagattagcataattcttaggagcctcggatttttggaatgacaaatgagcattggtttcaacttaaagtcaccagctgcattagcccattttaaaaaaagtcagcctgtcttttgtagctttgtagccaggcactgacttttcctctcaagctatgaaaatctgagatggcatcttcttccaatagaaggctgttttgtttgcatgaaaactctgttgtttagtgtagccaccttcattaatgatcttatctagattttctggataactttctgccggttttatatcagtacttcctgcttcaccttgcacttctataatatgttatggaatggaacggcttctttccttaaacctcatgaagcaacctttgctagctccctacatttcttctgcagcttcctcacctctctcagccttcatagaattgaagacagttatggacttgctctgaattaggctttggtttaaggtagtgttgtggctggtttcatcctctgtcagatcaccaaaactctccatatcagcaatacggctgtttcactttgtattatttatttgttcactggagtagcagatttaatttcccttaagaacttttcatttgcattcacagcttggctaactgtttggtgcaggaagcctagctttcagcctatcttggcttccaacatactttcctcactaagcttaatttaaagtaagagacatgcaactcttcctttaacgtgaacacctagaggccactgtagggttattaattggcctgatttcaatattgttgtgtctcaaggaataggaaggcctgaagagagggagagagatgaaggggaatggccagtttgtaaagcagtcagaactcgcacaacatttatcaattaagtttactgtcttataaggtgtgtttgatagtgcccctgaacaattacaagattacatctgtattagtccattttcacactgctgataaagacatacctgagactgggcagtttacaaaagaaagaggtttattggacttacagttccatgtggctggggaagcctcacaatcatggtggaaggcaaggaggagcaagtcatgtcttacatggatggcaggcaggcaaaaagagaacggggatcaagtgaaatgggtttccccttatcaaaccatcagatcttattcactaccatgagaacagtataggagaaaccaccctcatgattcaattatttccacctggccctgcccttgatacctggggatgattacaattcaaggtgagatttgggtggggacacagagccaaaccatatcaacatcaaagatcactgatcttaaatcaccataacagataaaacaatgaaaaatttgaaatattgtgaaaattaccagaatgtaacaaaaacacatgaagttggaaacatggtgccagtagagttgctcagttcagtgttgccacaaaccttcaatttgttaaaataccagagaggctggggtgggaagatcgcttgaggttaggagtttaagaccagcctgagcaacatgaagaaaccctggtgtctttaaaaaaaaaattgttcaatgaatcaatgaatgaacggcagtttcagatattttccactcttctcaaacatcttacatgtcatttctatcttgatcctcagcaaataactatttccaagtcaatggtaagaatagaaatctgagatggaaaatttcttcctcatttaccatcaaaactacaaatattctcccatgattattttcctctgttgcttctgctctgaatgatatgactttttttcttttcctaaaaccctaggttccatccacattcaccttagaaggattttgatttttctctgattctatctttctcccaaattctgtatgtagcctagtgattatgagcatggactttacaatcaggctttgtgtctgatttgactcaaatttgtgtctgttactatgaaatcttgggcaaattatgtatctctcagcctcagttttcttgtgtgttgaagataataatacctaggtcatggagttgtcgtgaagatcaaaagtgatatctttaaagtgctaagcatagcaggtacacagtaagcatgcaaaataaaggtccttgcattatttttacctccctttctagtggctcctaaccttattaagagtctcttgtcttaagaaattgttctactacttcagtatttagcactctctctctctcttcaccatcacagctattctccactttttatctcctatttattttggctctcacatcagcctggcttcccaagcatttcaaattttatttttaatcttatttcttttccacccctttctctccaaatttgctctgcttccaataagttcatctatcatggctcaaatcagaaaaatagcagatgcccttgttcttttgccctctctacatttaatcatcaaacagagttctgataattctgctgcctaaatagttcctaaatttttctacatctcttctttgggtgctaccatttcagtccaaggcactatcatctcacacagtattgtgacaatagccttctactattctcccctttgccacactattccatactccacactatagatagagtgataacaagaaatgttatttccctttataaacattctaatgagttttcttgctcttagggcagagctcttcttgatcaggtcttatttatctcttctttcagctctatcttataccactattaccctgtgcatgccctagctctgatgagtttctttcagtttcattcagatctcttatttcagcttttccacatagtgttcctctgctgccttcctgatccttcttggggatcattgctacttggcctctggtttcaacctaaactttacttccttgagtgaccttcgcttaggctaggtacttctgtggtctgttctttattaccgtatcatcatggtgctcatgacattttacagttccttatctccccccaagattccagaaggcaggagccatgtctttttcattctctaccacaatgcctggcctatagtagacacccattaaaattttgttaaatgttgttaaataattaaagcaagagaaaaatcatcctatataacatgttagggtttagaactacatatggtattcctgtatttaactttgaatatttctttaaacataagtaaatgtggaaaataataatgctgcttttcagcacatgctcttatttttctatcttcacacattccctaattttaaaatctctttatgtttgtttttattccagactacaaacatcaaatcttttttttttctatttggatgcttttaartataaagtgtcacttaatatcagcacttctgccaactcttattcatttttccagctgtatttggacaacatttacatagataattttgtgaaattttcaactagaagttgagttgagataaatcatgcagttttcaattcagtgtatcctgaaagataacgaaactcactgagctgcctggttttccaacaagctacatagaaagcatgaggagggcagaaggctatggcttccactgttttgaccacttcacagcccttccygcagactgcttggagatggctcaagtggaacctgttgataaattaatgatcctctttttcccagtcaccattgagccaaagtaggctatggggctgaatcatcccagacagggatgaatgaatgttctgaaaagctgaaacataaactgtcagttaagatgcattttcttcaagtttatttgtgacagatgatggaaggtagttgatattgactgagtttgattgtttcttaggaacaatcacagtcatttgattgttgttcctaagaaagtagtctttttaaaaaaacaaaatctgagatacaaatgaatcactatatgttaattttccttgcccttcttaggtgaccactgactatattttaccagttgttaatgtagctttgggggggattttgttcatttttttggtgcaccttggataaaaaataattggaaatatttctcattttgcaattactgacttttcatactactggaatacaggatttgtcagagttcttatctgacccagaatagattagacacgttttaagatcagtaagaatcatctgctttttttttttttggtggtggggtgggaacatggtcttgctctattacccaggttggagtgcagtggtacactcacagcttactgcagcctctacctcctgggctcaagcaatcctcctacttcaggctcctgagtagctgggactacaggtgcttgccaccatgcccagttaattttgtattttgtggagtcagagtctcactgtgtttccaaggctggtctcgaactcttgggctcaagtgatcctcatgccttggcctcccaaagtacaagtattgcaaatgtgagccattgtgcccagcctatttgtcttcttaagcctacaataagaatgttgaaaagatagtttatttatataaccccatttgatacaaaattcacatcaaatagagttaattaaataatggatgtcccttgttcatcatttcaggcagatacaaataccacttttagcaaaaaaggtaaatctcttgttttaagttacccagacgaagattatatagaaagttagggtaatgacattcccaaggcaaaagttcttcagggaaaaatagtaagccatttcagtttctcaatttctggagggcttatctgaagggattgggatgtctaatattgcaaattaggcaaattgtgcacatttatcaccatgcaccttggatttcaagcagaaataagaggaggatttgactgaagggaattaactttggtcttccaaacttaaatatataccagatgtgtactgtggaaggatcttcctggttacagtataacctctggttcttttggactcttgctaacttaatttacccagttcttttcccgtatagaaattagactgtggattgtttctgtggattatactcatggatttctgtggattatactcatggattttattgttttatcttatttacagattctgacttttttcttttctttctctttttaaaaataacttaagatgtttgtttggaagattggcaggatgttcgttttacagtgttcaaaaatgagttgtttgtgttttatgtatatgcccaaatactctgtgaaaacataaactgataaaaggaaaattaattcctatctttataaagtgaagaattgtttttttttaacaaattaacatatcctgagttacattcttgagtgagatatgagaatttaaacatataacatgaatacccccagttttgagtgctaatatgcaaggaaaggctttcctcattactgttttacaacttttatgctccataaggttgattctcagtgctagttctctttcagagagaagattcagtaaaaaacactgtataccagtccttaataacttaaatgcaaatactggcatatatccagaagctaaggttcaattaggtgtagttgtttcatcttacaaaattattttaccagcaagaaatcttggcagttatattgatgatttctcatgaaagaggcaaatgggacgataaagaggcctgaagactattttttaatactaattttctaattcctcatttttttaaatgtcagaagccaggccttagaaatcaagcacctgagttttcctctgattttctaatcattactgtggttattctagttgtctcttatctgttcggaagtcataatgtgtaatgatggcataagtgaatgttaaagaagtggaaatttgatatgatctagatggcagtttattggtttagtttcaaagacaattttacctggaaaataaataagaaagcttatcaagcttttccctgttatccgtggtttatctgttccttgtgtttcatcttgaccaccactggtcttccagaaatcgctaaaatctctcctgcctatgtcatttctttttccttacaagatcaaagcttttatgagcattatttattgtagcctcacaatattctagagagcaaagtagaggttatgtgtctccatctttatttttaaagccaagtgaggaacagataaatctcttcgctaacgttacaaaatgaagcagtggtagaggcagaaataaactcctgaggcagaaacatctcctaattctggcccttacgtctaagatgcagtagactgtttggcctttctctaaacaggcctttgacatttagggtatgtggaaagtatgtgctcccgtcagagtttcgctgtttagttattctttgcctgttaaagtaatgactagaagactggagaaagcagaaagaacatccaagtcttatttcagcctctgcgtttagtacatgtgagctttggacagagagtgcctttatttcctgggaattaacttttctctctttatacttagaaggaatttttctttggggcactgctgatattgagaatttgggggaaattattatttttttcattcaagttttatgtgtgaaaacatatattccaatactagaccacactgagaggatttggggagatgactgcaaagttttacattttaaaatgtaggtttagtgccttttttttaaacctgaaagtcattgcaaaaatcgattaaattttaaaattgacttaattcatcaatctatattgctataaagttttttaaaaactaacaacttgtttgccctatgacaaatatttttaaaaataattttcaactgtatttttatttcaatatttatcaccctgtggttattttattttatgattttagctgtttcacttttttttttctttagtatccataattgctgattgggaatttttaacacaagacaggaattgttaccctccctccccccctcccttccttccttccttcctccctcccttcctttatcctttctcctttctcctttccctcccctcccctcccctcccctaccctcccctaccctaccctccccccctccccccctcccctcccctcccctcccctcccctcccctctcctctcctcccctttcccctcccctcctctcctctcttcttttctttttttcctttctttgtcttgctctgtcaccaggttggggtgcagtggcacgctctcgctcactgcaacctccgcctcctgggttcaagcaattcttgtgcctcagcctcccgagtagctgggattacaggcacgtgccgccacacccagctaatttttatatttttagtagagacagggttttaccacgttggccaggatggtctcaatcttctgacctcgtgatctgcctgccttggcctcccaaagtgctggaattacaggtgtgagccaccgtgcctggctgcctctttctttttttaaagggctgcttttcatattgacctacatgactaaacctgagttataattcagaagaaacagttgaactattgtgtgccatcttgtcataaagcgcaggttagcacaaatgtcttgccaatgtcttaaatgttgcaatttttgtaaaatcttccgtgtgcctccaacatctccagttggtgaacagatctcactgtatttatccctgttgtgttcttccacatgtttgttttgcagcataataacacttgacagttgtaaatttttccgtatgttctgttttgtagagataaacaatgtactttctgtgtatttccctgagctttgaagacttaacttttgaaataaacaattccataggattttataggaggctttggtacgttattcacacaaactattctccttgaaagggaaggtagttgaatgttcatccttttgatataaactggttaactgaacttttccaagggatcaagcacaacttaactgcttttagctttgcaaccagggcaatgcagaccagaccagtgtttgaaagtctttaaaagtattatttgacatcataaatgaccattctgtggaataagctctctaattctctgagtggtttacttcagttagagggattagtgaattagctttggatttgcttataatttcctcttttatcttttacaaattaaaaagttggtatcggcatgtaatgatagcatctaaaacatttatgttgtggtggttgtatcatagaaaacattctttaggattcaattataagcagcctccttccattagcatgtcaagtttttctgagcagttttatttgtgaaaaatcagtacagatatttttattcatagcttgatatcctttttttttttcttactcaaatgaatatctgtttcctacctttctccctcaagatgcagtggtgcttttattatttgattttgtaaagcctgaagggcagaaatatttcttaagttttccattgttaactacaaacttggctatataaaatatacaaatcataatatctgtatggttatttttattgtcatttctttaacacacaaaatttatcacatttatgcaagaattttttaacttagaaaactcaaaattgatatgtaaattgggtggtagcaacaatgtgtgggatgtggtacgtggccaatgatgtgttggaggcagcccccaccagctcccaagatctagtgattaaattttcagaaattttgtgagccagttatcagtaaaaattaaactatataaacttacaattaaataaattatttaaaaacaaagataatactcaaaactcagtaattatgttttactacattttattatctatgctcttgaggttatttgtgtctcttgtatctgtattggaaatactatataatggtgtatactattgtatatctcttcacaacttcatgttcattaacatcatgttgatagcttcaaattagccatggtagaagtattaacaccatgaaaatcagcaaacacaaccaatcaggggctgatttattgttttgctgattgtctagacttaagaaagtgatggaaaaaatgttaataacacatattaaaaagtgtgttatatctggccgggtgcggtggctcatgctgtaatcccagcactttgggaggctgaggcaggcagatcacaaggtcaggagatcgagaaccatcctggccaacatggtgaaaccccatctgtactaaaaataaaaaatttgctgggtgtggtggcgcatgcctgtaatcccagctactcaggaggctgaggcaggagaatcgcttgaacctgagaggcgaaggttgctgtgagccattatggcgccactgcactccagcctggtgacagagcgagacttcattccaaaaaaaaaaaaaaaaaaaaagtgtgttatatatctataaccattatactatgaatagcaccaaaaacttgagaaaatattctttcaggacagtatttgaaaactattatctaattcattggagaagtggttcacgtcacagacaagtgaatgactgaagtttgggcatatgcctgtgtttaccttttatttattaactaaacaaacccatcagccttctacagcaaaattgtaagaatgagatgttgcttcaagtacatcagacattagatgctacatacatcaggaagccttttatagttctcttttgaaaactgtactactcataatatgctgtttcctactcacctatgaccctagacttcctgtttgctctaatggttgctgttaaaggtatgacaaattcagctgtaaagtgtttagttatccacatccatctctttgaccacaaattacctaagaatggtgttacactacttttgtgggaaaagagaaacatcataatactggatacataaaatcatagcttttcctttccttgggggaataattctgttatctacccactgttgggaggtagtttagattggttaatgtaagtatcaagggggaaaatggctgtattcaacagaatttgtttcccttaatcttatggatagcttcacaattcatgatagcatagttatgcaacatatatgaataaggatgaagatgagtatcatttgattaaagtatagcttctaagacttaaatgaccagaaagaattgaactgcgtttaaactctaccacacacctgctccttatagtaggataatctggtcaagcccttgacttcaaggagcttgctaaccctggtattaattgatgtttcccaaactttagtcaactgagtatcatcctcaccatatttgttctatctctgtaccgcttgtacttttatttactttgtaattttttaaattaactttttcttttaaacttagctttatcctaagtgataatactcatgaaatcttgggtttaaggtaatagttatgttttttctagtatctattaaaatattgcctaacaattacaattttagaaagacttttctttttaccaccaatggtatgtctattttgctttgggaactattgtgctagtgatgataatagctaggcattaagttaaattgtcttgtttgttcctcacatcaatgtgataagcgttgctctctctattcagtaaatgaagacaccaaaaaatcagagaagttcaacaacttgtccaggtcatgaggcaagccagaacttacctgggtaaggtccatatgagcccttggtcctcacagcattcttagagaatcacccgggagctttttgaaaatgcaaaatctctggcctcactccagacctcctgaatcagaatctgcatttgaacaagatcctccaggtgattctcatgcacattaaagtttgagaagcactgagcttaacatttgggtattctgcctcccgtaggagaagatgggtgactgggtcattagtttggttgttctgtgatctggtttggctctgtgtgcccacctaaatctcatgttgaactataattcccagtgttgtgggagggacctggtgggaagtgattggatcatgggggtgaatttcccttttgctgttcttgtgatagtgagtgagttctcatgagatctggttatttaaaagtgtatagccctttccgcctttgctctctctcctgttctgccatgtgaagatgtgcaggcatccccttcgcctcctgccacagttgtaagtttcctgaggcttcctcagccatgcttccttaacagcctgtggaaccgtgagccaactaaacctctttctttataaattacccagtctcaggtagttctttatagcagtgtgagaatgcactaatacagtctccttgtctctctgtagtgttattttcttcatgccatgctattctgagctgcaactatttttgagccatgtgatattgatgctaaggtagaagataatattctcaatccttttgattattttttctctcctaaagtcataatttgtccactttccttccttccttaattggagtaccaggactagcctgagggtcaacatttatactctcttttttttttttaatccttgttttcttccccagcagccacaggtcaagttcttgccccttctaatggtctggtcatttcttttcctgtctgcctgaaactggcagaccctgagaactgtctacaggcctatagctaattctcagtttttcctggatagttttaatagtatggatgtcatcctgactcttagcttcttttccttctcccaccagttctctgccattcagctattttaccgctgcttttctttttactaagatgtgcctatctctgcatccatgaggcctctgtttccattctaccttgcagccatctgcttctcacttttgctgttgttgctcgtaattgtaagtttaatataagcagcagcctcaggagaccccatgaaagcaatcttctggaaacagtcaaagtgctgggaatttgatggttggatctgggaatatcaataatgtctacaactgatgaatgtagctggctatagattctgaagtactccagtgcgtcatcagcatttcatgagtatactgtctgtgtgattttttcacagagtttccctttgaattttatgtctgcagagtttctaaacactgcacctggctcatacagttacaagccttctttctcagtatttatatagttgtttattcagtctccaagatgattagttatttgagatgagtagaagttgcatctattcatgtaatcagagcttgttttcttgctcactggtggccagatacaggtcataatagtattttattttcttaactttgaatagcgttaaaggggagtggactcatttgaattacaggaggtactgaaagaaaactatattattcattacattttgtaaagcaaggaacaaagaggaatagttgtttcctaccatggtaatttcagactctgaaagatctgtttataagccaaatgtagacatacctatccctaacccagatttttttatggtcttcaattttgtaattatttagaattgaagggttttttttcctttctgccacatatttttgtacacaccctttctccctcccctttcccatgcttttgtttccttgagaaaaggagcgtccctcttagagcatagaataaacattctttgtgaagtgtgacttatttatgcttcaggggttgtcagtgtatacacaatagagaaggtgatggaggctccgaggcatgccaagtcagcactttgtgcatgttgaggccaaagagcatgttaagcaggcttaaaaaattttaacaagtcagaacattttacaatttccatatttatcaaacatgtcaggggatgggatcacaaagccttccagggattaactgcctctctgacttgaactgttttattaagatggaagaagccaagttctcaacaccctgtgatttgctctaataaccacaagaatcagaatgtaggtgatccttgctgaatgaaagcaatcctaaggctaaatgctctttgaatggggaaaaaaaaaaactctctcaacagatgaactatgtgtgaaactttctaacagagcttaggagtttgaagtttatttacctagagcttcagttttattaattctctggttggtggttcttgacctttgacacccaaggacttagactgtgaagcctaaatagaaggcattcagaaacctgaagacattctcaaagaggggtggccattggcttttttggggttggcaaaacatcctagagttattatttgtttttacatgtttggggtttggcagatcctaagatgcattttgccaagcactttcctttgaattttagtacaggaatatcttgggtggaatttaattcgtgattcatttgcattatactgatcagaatgccattttggaaaagatatctgatgactgagaaatattaggagatttacaatttttaagtaccaactttttcttagatgggaagaaaaatggaattcaagccccaattattttcagtgagatttggaacttggaatcttgaactaagtagtagtttccaaatgtgtctgtattactttctctacaaaagcgaaccagactacttccctggcttgatctgcaaatctttagaaaagttacagagctgatatgcaaccttgggctggtatttaatttgaaaactaatgttaaaaaggctttctgataagtaagtagggagagtaaccctcttctgaagaaatagattggaattaaaaaacaaactaagactaagcataagtgagatcttgggtttgaaagccaaattgccaaagatggcaaaacccctagagggctaaagttatgtgaagtgccatgaggtagcttttccattactgtttgcagaaaaggttgtaaaagaaggaactgtgctgaaactttacaaatgagtaccaaaccataaactttttaaagaacagggaaagcacatagctaaatatggtacccaacattattgcccatcaggctgcaacaaagcatgatgacaaaaacaggttttttcttgtctactgtcagcttcctattgtttgtaactggcccaggaaaagcagtgccagcaactcaaatgactgctctcactgtcttcttgagaaaacagcagtgcaagcaagcgtccatcaggaaaagaaagaagcattttaaacaaatttacatggatatctttaggttcaaattattttgaaaccaaaggatatgaagtgttgggaattctagttctgaattctataaatcagtgtaaggagaaggacagtgtgatagagactcttttatttgcttcaaatagtggggtgaataagttataagagtatcactgggccagtgttgatgattttcttttctctcttgttccccatgttcttcaaactgcttaaaagtcaaaacacaagatgtattttgagttcttgaccttatcctggccctgacttagtttgtcagaatattaggttgtctacagagatccaccctggtttccatctaaatttttttagattttggtcaactttctatatctttatttaaataactgtaagtattcctttcagtataataaaaatttatgtttttcttcttcttaaactttggtccttgtccttgttactttaaaacagagaacttagtaaagataactttttcttttatttctcatttttctctttctctctctatacccctctttgcttgcccccgcccccaaccttgtctctttcttactggctataatctaattagtgaatgcttatcaatgaccaatgagaacattgtcacattttacattttgcttgttactgaactgtaatctctgttgcagaaagcaggatttttgtgaggttgaaaggaaagtgtggcatcccatgagtctgatgctattacgttttagaaaattgaaatgactggccaggcgtggtggctcacgcctgtaatcccagcactttgggaggccaaggcgggtggatcacctgaggtcaggagtttgagaccagcctcatcatggagaaacctcgtctctactaaaaatacaaaattrgccaggtgtggtggtgcatgcctgtaatcccagctactcgggaggctgaggcaggagtattgcttgaacctgggaggcagaggttgtagtgagccaagatcgcgccattgcactccagcctgggcaacaagagcgaaactctgtctcaaaaaaaaaaaaaaaaaaaaaaaaaaagaaaagaaaattgaaatgacttactacattattgagagcatatcttagctttggataataaagaatatagataaacattttaagagcagctcttgtttcatacttcttatctcacacacagtgccttttacacaataagggctgaataaaattgttacccattttagttcagttaatttttgaatgtgagggcagatcatttaattccgtatcttaatatataatccaggactggtgaataatacttcctgccaaaaatmcattaaccttacaggaaacaaaacccagtgaggatcatagaagtaaaaataacttaatttagatttcataagttgttatttttttagagaaaagcataaaatgttctgtacctgcacatttgaaaataaaatcaagaagcaaaacattctcatgagtaagaatatgaaacaataatttgaaaataccaaaactcagtatttattactgttctacagtagatattagtgactagggaaaggacaaggtggctatggggtagtagaaaagggagccagatatgcaaacctttggggatgatgatttaactgcttcatgacagttaagaaaagatttattttttttagggtttaaaattactatatttaaaaatatataaatatttgagttttttcctcaagtctggaagcagaagcattcctcagtctttctctccttcgacatggcagcaacagcaacagcagcagcagccaccgctgctgccacsgccctggctccacctagggaaattgcagaagaccctatctcattctagtgaggaaggttctatgaagtagatagttcatcttgtagactttttagaccattgctgtaaaagacttttatattttttattttttgagacaaggtctcactctgtcacccaggctggagtgcagtggcacaatcatggctcactgcagccttgacctttcgggctcaagcaatcctctcacttcagcctcccaagtagctgggactacatgcacatgccactctgtcagctaattctttttgtagagacaaagtctgactttgttgcccaagctgatcttgaactcctgggcttaagtgatcctcctgccttggtctccggaagttctgggattatagatgtgagccaccatgcttggccctaaaacttttagagccatcttcaaatgttgtgattgtctagctggacatggtggctcatgcctgcaatcccagcactttgggaggccgaggctggtggattgcttgaacccaggaattggaggccagcctgggcaacatggtgaaaccctgtctctgcaaaaaatttaaaatagttggggatggtggcgcagcctatagtcccaactactctggaggctgagatgggaggatcgctcgagcccagcaggctgaggctgcagtgagctgtgatcatgccactgcactccaacctgggcgacagagtgagaccctgtctcaaaaccaccccacctcccaaaaatgctgtggttttctgtataaaatgggactaactattgacacttctttataaatcagataaaattatattgaagtccagtttaagctcattggatgaaggatattgcatttcagtgtagtgtttataagaagtctactttaaaaatatatttttaaaaatgattgtaggatcctgtttttttgttttgttttgttttttgctttttgtttttttttttattctaacatttcctatgttcccacaatattaagagaccatttcacatcacagtctcactgctggagacttttactataatatatatttatctaaataaggttttatttatttgtagctgcataaataaggtttctacttagaaggaagcctcttgagagcctatatttgttttttgtacattttaaacttctgttctttaacaccagaaagcaaaagaatgaatagcaggtgaacaactctaaaaaagtagagataacaagtagaaggaaaataatgtttatgagaagaaaagtggtcttgttattgagggagccaagctgctaaacagagtgggaagagaacatttgttcagtctctacttgctggggcaataaagccttctatctgcccctgttctgtgtaaaatcctgttaatattagatattttaaatttatgatgataaaagaaatgtgcaccttttgtgggaaattcgaaaagaacgaggaaaaataaagaagggcaaccacctctaacaccaccacccagaaataatgacagctttcaagtgtgtttctttctaatcttttctgtgtaatttaacataattgaaattatacggaataaacagtttcttggcctgctattgttttcatggactacaattttgtactctcattttgagtaattataatgtgccaggcactgtgttaaacattttacaaatattaatattatctcttctcagcactatgagggtgggtatagttataccttgagcttatatttcagggaatgtctacaaatgagtctactgctttaagtaggcttcactgtatgaagaaaatgcagacagcagaaaagaaagctagacgtttttcatggatgcttctttctttctttttcttttttttaggttttattttggagggaaggaagaagaacctgtcttctttaaaaaatgaaatatttttaaccgaaatgttatctagtgtttagtgtgtcaacaagttctaaattgtggaaaagtcttatcagaagaaaggctgctttgaaaacgatatggaaatatttgttgggtgttcactccttcaacgtctaaatgaaatacactggggagtaactgaattttacagtatttagatagctacatagtgagcaatcaaaacattctttaagtatttaataagaggttaagatcrgcccgcctaaagcttatataatagaactgagtcagtgatgatgagcattttttcatgtgtctgttggctgcataaatgtcttcttttgagaaatgtctgttcatatccttcgcccactttttgatggggttgtttgttttttccttgtaaatttgtttgagttctttgtagattgtggatattagccctttgtcagatgagtagattgcaaaaattttctcccgttctctaggttgcctgttcactctgatagtagtttcttttgctgtgcagaagctctttagtttaattagatcccatttgtcaattttggcttttgttgccattgcttttggtgttttagacatgaagtccttgcccatgcctatgtcctgaatggtattgcctaggttttcttctagggtttttatggttttaggtctaacatttaagtctttaatccatcttgaattaatttttgtgtaaggcaatcagagaaatgcaaatcaaaaccacagtgaaatatcrtctcacaccagttagaatggcaatcattaaaaagtcaggaaacaacaggtgctggagaggatgtggagaaataggaacacttttacactgttgatgtgattgtaaactagttcaaccattgtggaagttggtgtggtgattcctcagggatctagaactagaaataccatttgacccagccatcccattactgggtatatacccaaaggaatataaatcattctgctataaagacacatgcacasatatgtttattgcggtactattcacaatagcaaagacttggaaccaacccaaatgtccaacaatgatagactggattgagaaaatgtggcacatttacatcatggaatactatgcagccataaaaaatgatgagttcatgtcctttgtagggacatggatgaagctggaaaccatcattctcagcagactaccgcaaggacaaaaaaccaaacactgcatgttctcactcacaggtgggaattgaacaatgagaacacttggaccaggaaggggaacatcacacactggggcctgttgtggggtggggggagcggggagggatagcattaagagatatacctaatgtaaatgacgagttaatgggtgtagcacaccaacatggcacatgtatacatatgtaacaaacctgcacattgtgcacatgtaccctagaacttaaagtataataaaatatatatacatatgtataaagtaatagaaatgagtccaggaatcagtaacttggatactttgttagctgttcgagaccctgggccaggccaacacttcctaaaggtgccagagcacacagagagcatagagattgcactgattgcaaacctatccaagggccccagctcctctgctaacacccaaggcctctccacctgtttttctccgagttgctcgtcaccctgtcctttaccttctagattccccagggctcctggtctccttggaattaagactttgagattttgttgtaagagtttccaaacaattcttcacaatatctcttgggtttgtccttgtttatccaggcctttgttactcccacagcctccttgccagcctttttgatgcatcctttgctgctcactgccttaatacccatgccatctccaggtctgtatttctaaaacatttctcttgtgtcattcctctgctccaagaaggccttgaatgtcaagcctgtttttcagcttgtcttttgaggtcttctgtaatctggctgtacacaaccttacacttttatttccggctccaacgtaaagcttcctatgaagtccagtggtgtgaatttcaacttgtataccttgattgtatttttcacaggtctagaaaatccttactttacaatttatttaaatctttctaatcttaagttctattttttctatgaagtattccctgattcagtctacctaggtcttttctttctctgtacttctcttacaggcagtatcataaagatgaagtcatgtttttatggaagccatttttccccaacgagattatagctgtgatggtaaagctggtacccttcaaaagcttattcctttcctttccctttccctttcttctgttttctcttttcttttttcttttcttttcttttctacctctgtcctcttccccatcacccccttgatattaacatcattgcactatatatccttttcctcccatcatctttcattttctcctgactcatcaatataccagcataacataggatgtatcattttttagtcgacaacaaaaagattttatttttttcttcatagcattgcataatatattttcatgtaatacagttttgaatcctacagaaaaatatgaagaaataaaagtacctgaagagccatcactgtgagtagtccaccatcaaaattttgataactgtctttttaggcatctctattcacacgcatgtgtgtgtgctcacacatcgacatgagtaccatactgctttctcatgaatatcttttttaaaatgcagattttttttggagaaggaagtttacctgccctcttctcttccccctctccccaccatctcttaacgcatttatgttaacaagctgtgtgtttttgcattcatcaaacccattttattatatgcaaatacattatatataatggtataaatggggagggggagtgtgttttgccaaaatgggatcaccttatatacagttatttggatcttgcctttttttttatttatttataattatatgttaagaaaatccttctaagaaaacattttatatccaactccaggagaaatattaaaaagggaaaaatttgattggatgagcagatattaaatatatatatatcaataagattttctctgtaccattaaataacyaactttaaaaaataaagaataattgtcattcatagtagtgtcaaaaatctttaaaatgcctaagaataaactaaaagggaaagttaccagatttctagaatcctgattttcttaaaaactggataaaataatgttaaaatttatayagaaaaattaatatttgaaaagaaccaagaagttcatgaaaaagattatctacttcttaaatttaaataaaaacatatattgcctgttttcttggcactactaaattattctacaacatgacttaatgactgcagagtatttcaacatcggaatgtactctcatttattttactagtctacttttgaaatttaggttgtttgtttgttttcaacatatatatttttgctatataaatatgctgtagggaatagccttatggacaaattcttatatacaaccctggttgtttttataaaataaaaacctagaagtgaaatkgctaggtgaattttcacatttttaaaacttttgccacaggagtgctcattattgcactttgctaataatagagtttgttaatctaatttttttttttttaagagtcaggatcttgctttgttgcccaggctggaatatagtataagcatgatcatagctcactgtaacctcagactcctgggctgaagcaatccttccccttcagcctcccaagtagctaggactacaggtgcacatgaccatgcctggctaatttttttcatgtaattttgtagagatggggtctcactgtattgtccaggctggtcttgaactcctggcctcaagcgattctcccatacgcatatatatcctcccacatakgtgtgtgtgtgtgtgtgtgtgtgtaaaatgcagtgtttttaggaaaaatataaagaggtcaacttactagctttcaaaactaagaagaaaagaagaacactcccttgaggtttaaggcattttgacatgtaaattgtacaccaatagataggcacattacatgtaataaccagaccatagactcttaattttgttgaacatgcccaaaagctctgtgtctctttatctcagtctgcttcagtcactagggcaatgaggacattaactatcacatcttgaagtaacttacaaacaacactttgacatttggagcattctataccagaaatctcttaaattacaatttgtttcttaggtctagcatgagtaacaccatcaaagtgtatttctttggcttctgctataatcaacaataatagtaataataactaacatttaatatatacaacaaatgctgtgtcaggcactgtgcactgtaactgaggtggtatatttacttttttttttttctttttttaactgatgaggaaacttacccgtaagagcatttaactaatttgccaagccagcaagtgaggatagagccctggagttgktcccattaccactataatcacttcctctagtcattctttccttactccaaagtttacttcatcatctctagccatttctagatacctttattcttttcttctcttgatgtcttcattttatctgtctcacttccatgacttcttcttcttcttcttctttttttttttggatgaggtctcactctgttgcccaggctggagtgcaatggtgccatcatagctcactgcaacctctgcctccgaggctccagcgatcctcccacctcagcctccagagtagctgggactatgggtgtgtgccaccatgcctggctatttttttgtgtttttttttttttcttttgtagagacaggtttcaccacgttggccagcctggtcttaaactcctgagctcaagcaatctgcctgccttgggctcccaaaatgctgagattacaaacgtgagccaccgtgtccggccaatttcttgtatggataccaaactgtgtcttatcctgcctcttttagttctatgtcttatcacccattagttttacaggtagccatatttatatttaacctacgcaaacttgatcttcatctgcagaaaaagggaatcaaatctactgctcatttcattggaaagaatatttatttatcttgatgtttaatcgagctgtgggctctgccttttaaatactgattagttctccaatagaacagttcttttgggaactgggaagcttttattttagacatttagggtatagttttgaattaaaggctatttttccataagcggttctgaaaggttaagttttgtacgaaagaatgggctctagaaatttactttggaacttagatcacttcattgggaatgcctaagtgaatctttgacataagttgtccaggtgtctttgctttattctttggaatgaaaaaatgtatgggtcaaacagaacccatctgtttggaatatctttagtatccagactctgacctccatgtttttggttgtgagaatgtcagcatagtacctggcttctagaaaatgctctataaatataaattgcctgggtgaataactgaattaatgagtgacttaatgatagagactgagaatgagaagatagaatggttgttctggaagtgattgcttctctccagctaagcctttaactctgggctgtaccatcagtagtccttgcatactgaagtcagacttttctggtcaagaagaaccttttaggttcttgataaaataccttttattcttaattttcctgtaagtacctgaatgtattatcttgaataactccaattcaggtccttagattcctcacgttacttgaaattctttgtttcctctaagagttcactgtatctcacaaatatcctgatataattctgttggtaaatattgatctcactttgctctgagatcaggctgatgtatatgtgtggtaggtaataatccctatttaggctgatacattgttcacatatgcacatattataatacacgcaaacatacagaaatacacactttttccctctgaatttttggaattgaagacatgatactcctttatccttaaatgtttccatgcatgtttcctgaaaacaaggacagtctcttatacaaacatgatgtaattatcaaaaccaggaaattaacattgatacaatactattatctagtctgcagactgtatttgggtttttccagttgttccartaatggcctttataacaagttaaaatccctgagcatgtgttgcattcacttgtcatgcctcttaatctttagtctggaacaatttattctttgtcccctgcaacttgacattttttatgagtgtaggctttttattttataaaaagctgctcttttgattttctctaatgatttcttattattagattcaggttatgaatttggrgaagtaacaccacagaattgatattttgtttttatctgttgttatgtaaaactatgaattcatattgataactacaatttcctttcagcatcacactattcattctgtgattcctcccttccatgtttttagcttccttcttcaacagcaagaagcctggttccattaccctcaataaatttacttatttactcaatcctagatatgaaaaagcaacttcagaattgctaacccatacatctttaaaaaggaatcctgttaactagtattcagtatttgtttagggtgctttttggttttagtctgaggacatatagtgtaaatactatctttaaataaagttacttgggttagtttttcgttctctcttctacccccaactctgtccgttggaagcataggcaagacaacctggggcttgtgattgatcatcagaagtttggtggggggcggttggtcttggggactgagccctcaaactatgggatctgacactatctccaggtagagtcagaattaaactgaagtagtggacacccagctggtgtctactaaagaaccgattgcttgcttggtgtgtggggggaaaatccccacacatttggtcacagaagtcttcagtgttgatggtggtgtgaaaacagaagaaaaacagtttgtgtttttccactcagtgtattataataatcccccttaacaatttaggaataaactgatattcctgacaagcaaaaataacttatctaaacatgtaatcatttgggctttagttttcacattcataaaaatgaaggcattggtctaggtgatctgtaatgtgctttccatccttaatatttttgaaaaaatatctgtgacatgttcagtatagctaattttgattaaataaacatattttaaacctatttttagaaccagttttggggagaatttttgcctttagtgatagagaatttttcccttaatgtaggtagtaaatgttataagattatattgtttatctacaaatcagcaagtataaccagggttctgaattctcatgtcatatgtaaatcagtaacctttcagagattaaatgagagcaatcatgtgatagcagcagcaaaagatcaatatgcaatgctagatatagaaatcttcttgtatctttaatatatatcttaattttagtccttgtattactgatcttgtgccatgtaacaaattaactcaaaacatagtgattaaaaacaacattaatatgtatgagcactcatagtttctggctgggtacttctagcattggatctctcatgaggtttcagttagatataggttaatgaaacacgcatctgacagcttgactgagcatggaagatcttctgtgttggtcactcgtaggctggcatgttgatgcttattcttaatgctggctctacacagtgagcaaagagacctagtgttagaagtcacaaaacgtgagttttatattccattggtcacactgaccaactccaattcaatatggaagaaaaactacccaagagcatgagcatcactgggagtyatcttggaggctgggttttagtgtctgtccttgtttttgttttcagtagaagaaatgacttttttagtgcccttgaaataattgctaaaatggtcctcaatgagatataatccttttgcacagataatggtacatttttttcttactagaaactagagcttacttactatatttacttactagtcctagagctcagtgttatttgctaaagaaaagttttcttttgttttgtttttgagacagggtctcgctttgtcacccaggttggagtgtagtggcaagatcttgtctcactgtaaactctgcctcccaggctcaagtgatcctcccacctcagcctcccaagtagcagggatgccaccatgcctggctaattttttgtatttttagtagagatgggtttttctcatgttggtcaggctggtctctaactcctgagctcaggtgatccacccgcctcggcctcccaaagtgctgggattacaggtgtgagccaccacaccaggacttaaagaaatatttgtggggctaggtgcagtggctcatgcctgtagttccagcactttgggaggctgagacaggcggattgcctgagctcaggagtttgagaccaacctgggcaacacggtgaaaccctgtctctactaaaatacaaaaaattagccaggcgtggtgatgtgtgcctgtagtcccagctactcgggaggctgaggcagagaatatcttgaatccgggaggcagaggttgcagtgagccgagatcacaccaccacactccagccttggcgacagaccaagactccgtctcaaaaataaataaataaataaaaataataaataaaataagaaatatttacggccaggcgcggtggctcacacctgtaatcccaacactttgggaagctgaggcgggtggatcacctgaggtcaggagttcgagaccagcctggccaacatggcgaacatggtgaaaccctgtctctactaaaattacaaaaaattagcccaccatggtagcagatgcctataatcccagctactcaggaagctgaggcaggagaattgcttgaacctgggaggcagaggttgcagtgagctgaggttgtgccattgcactccagcctggacaacaagagtgaaactccgtctcaaaaaaaaaaaaaacaaaggaagaaggaaatatttattgggttgggtggagtaggctcagagccatgaatgttccaaatgatagtaaaattggatctcagcttcctattttatggcaaacgaggtgattactggtaaaataaatgaataaataaaaaataataaaaataaagcctttaaagagaaaatgtaatagttctttccaatgatctttagattttttaccataatcatcagaattatctttgatggtttctaaaatgtgttgtattaatgtataatgtaaactttaataaatgtgcttttaaatgccagttgctgacattaaaatatatctataatgaagttcaaagataaatggaactttctgaaaactcctttgcaagttaatttagatataggaggtaggatttgaawacaggatcacattataaactcaatagtcctagaattattatttaatatataaaagatatcaaaatgcatttgtaaacatttgaaagataacagaattggaaaattattgttcatttaatacaaaaatgctttcagaatctcttagctttttttgtcatttactagaaaaattgctggtttctgtattttttctttttcttcttctaactttttaatttattatacatcattgtactaacagtaaaggaaatttaaatgatgaaaataaaatctgccatcttatcaagttcaatgtgactgtaaccttttagttctttgtgtgtgtgtgtgtgtgtgtgtgtgtgtgtgtgtgtgtttggttggcttttattgatgtatataaaaagattacagacagcaagagaagataatcagaggccttttcgttcttatcaaattaagttgctttatagttgtatttttcttttatattttaatatgcatttgtaattgatagaggaaagaatttgtctttcctctgtctcctctaattttgtgccaaggaaaatctggcacagaattaatcaaatttttgcctaatttttatcatgatataattaaaaaattgagtatatgatactcaattttatctttattgtattttattagcaagggcttatttattaatgtatactaggttttggagaatgactttcaagtataatctgtttatttattcacaattggtttaccagtytcctgatgtttctgtccctttgcatttttggtcacatacctttgaccctttttggcctttccagtagaggccaactatagatggagaaaaaattcaatgcatcatttgccttccagtttaatcagtagagtaggcaatacrtgtacattttttgtttgttttttaaaagtctctctgccatgacatttccaatcccctagctccctctttaccactgttatcagtctcagaattatacttccaaagataatctgtgcacaaacaagcatgtgtaggcatatctrtttttcttgtacacagttagttgcatatcatacatactcttttgcacctcactttttttacttataaatctgactcattttttaaggttgtatagtataccatcatatctctttggtatcatttctttaaccaaacattattgctggacatttaagttatgttttgattgttagtgaacaatgcagtatgtatatccttttaaattcttagtgtatatatgtgagattatctgtgagatgaattctgaaaaacgtaatttctagtcaaagaacagtgcacatttaaaattttgttagattctatgaaattgcctaagaagttgaaccaatttatatttccaccaataacacataggcatattcttttgccaacacctgccaattgaagatatttcaagggccagcatttgatgtcatacaagagacatcaaatataccacttagtgaaaaatactttgttctatcccaaagaaaactattgataacccctctaagcctccaccctcctaacttttttttctttcatgggttattcatggctagtgtcctcttccagcaagcttaagcccccaaatcagtccctttcttttgtcctccacatcacttatgcgtgatcccaattggatttcacctctgcatttagtacctcctttccatttccactgccactgccctaattctggcctacttataacatctttggattattacaaagccaactaatcttccgttaaaaaaattctcccttctgtaattccttctcccaagtgctgtagttatcttcacaagatctgagtatgtaactgcattactttttaactatttcttacccacgcctagagttttcacgttgaccttcaagacacaatggcctggccttacctttccttttcaactttattacccactactctctctcatgtcttccttgcatgcacacatagctgcaattattctggatttttcatcatttcctggatagccctccattttcctgcgtaatccctttgcttttgttatttgtaacatatgcccgtaatattcccttttgcatttctgctaggtggaattctactttttaaaacttaggtcatatacgactccttccatgacatcctgtttccctggccaaaagtagttttttctatatgcgtcataataatgtattttgagatattgctagtatcaaacatatttcattatgtattttagttgtacatgtctttttccctcaggagatcacaatcactttgagagcagtggcaatatcatatccattttcatatacttctctatcccacacataatgtatgtttctagtaaactgaattataaatcctgtatttaaaattttttattttatagtgattttagagttttcctctttgttacagtttttagaatgctttaaaagatttaaaagtttagtatgtgcagagaagaatgtctgaattaaaacctgaaatatctttcagattcagtgccagaaaggcagtgtgatgccagaggaagaataaggtcttggaagtcatgtatatttagacaagagtcccagtgccatgaccactttttagctatgattatataaaaacccgaacctttttccttgtctttaaaatgaggtgactggagtaggtcagtgtttcttaacacatttctgttataaagcatatgccagattatatgtatgcacatgttcccatcagcatacttagattttgatagaagataaaagaattaaaatgttttaattttaattggattttgtagttaccacaactatttctgctatacttggtatagcagtaagtggccgacttcagaatgcagcacaggaaagatagattgctagttatatgtgagcctctctcttgcttcccagtgagctgcagctactttctcagaatgcaagtgggttagtgaggttgttataggaataactttgaatgtaatctaagttatgcagacattaatcaaaacagtcatagtattttaattatttataggaataaattacttcttacagttgatcttggctcctgatcttgttacattgttatgagctgctgaacaagaagatcttgaaattttcgtccaactttccaattctgattgtttattctcctttccaaagtatagttgggaataagaagacactgaaagttttcagcagttctttttgacctgggcttatggtaacgtaataggggaaaaaatgctttcagttaaagtaattggacatctaattagcatttcctattgaaggttaaatattaaatatttttcccagcaccatttattgagaagacaattcttttcccaatgtgtgtttttagtgcctttgtcaaaaattagttggctataaatatgtggatttatttctgggttctctattctcttgcattggtctgggtctgtttttgtgtcagtaccatgctgtcttggttactacaactatattttaagtaaggtagcatgatgcctcaagctttgttctttctgctcagaattgctttaggtatttgaggtctttttttttttttttttttttttcttttcttttgagacacagtcttgccgtatcacccaggctggagtgcagtctctcaatcttggctcactgcaacctctgcctcccgggtttgagtgattctcatgccccagcctcaccagtagctgggattacaggcatgcgcgccacacccagctaattttttgtatttttagtatagatggggtttcactatgttggccaggctggtctcaaactcctggcctcaaatgatccacccaccttggcctcccaaagtgctgtgcttacaggtgtgagccaccacgcccagctatttgagatcttttggggttctatacaaatttgaggattgtttttgtctaattttgtgaaaaatgtcattagtattttgagggggatcacactgaatctgtagattgctttgggtaagatggtcattttaatattttttagtctgtcaattatgaatatgggctgccttttcatttttttgtgttctcttcaatttctttcaccagtgttttatagtttccattgttgagatttttttcacctcctttgttaagtttattcctaggtattttattttattttatagctactgtaaatgggattgctttcttgatttctttttcagctagtttgttattggtgtagagaaacactcctgagtttcgtatgttgattttgtatactgcaactttactgagtttgtctattcattctaagaggttttttgatggagtatttaggtttttctatatgttaaattatgtcttttgcaaacagggacaatttgactttctccttttcgatttggatgccttttatttctttcttttgcctgattgctctggctaggacttccggtactaaattgaataaaagtggtgaatgtgagcatctttgtcttgttctggttcttagagggagaacattcaactttttcaccataaggtatgatgttggctgtggatttgtcagatatggcctttattttgcttaggtacattccttctatactgaattcattgacagtttttactataaagggatgttgaattttatcaaatgctttttctgcatctgttgagatgatctttttttgttatttattctgttgatatgaggtgtcatgtttattgatttgcatatgttgaaccattcttgcatccatggaacaaatcccagttgatcatgatgcataacctttttgatgtgctgctggatttaatttgttagtrttttattgaggatttttacatctgtgtttatcaggactattggcctgtagttttctcttttggttgtgtccttgtctggttttggtatcagggtaatgctggacttatagaatgagttttaaagaattcccttcccttcaatttcttggagtagtttcagaagaattggtgttagttcattgttaaaagtttggtagaattcagcagtggaggctaggtgcggtggctcatgcctgtaatcccagcactttgggagggtgaggcaggcggatcacttgaggtcaggagttcgagaccagcctggccaatatggtgaaatcccgtctctactaaaaaaacaacaacaaaatacaaaaaaattagctggccatggtgacaggcacctgtaatcctagctactcaggaggctgagacatgagaatcacttgaacctagggggcagaggttgcagttagctgagattgtaccactgcactccagcctgccagcctgggcaagagtgagactctgtgacaaaaaaaaaaaaaaaaagaaaaaaaaaaaagaattcagccttgaagccatctggtcctgggcttttctttgtagggagactttgtattgctgattcaattttattactcgtcattggtctgttcatgctttccatttctttctggttcaatcttggtagatcgtatgtgcccagaagttgatccatttcctctaggtttttaatttgttagtatgtagttgttcatgattgtctctaataatcatttacatttcttctgtattagttgtaatgtctccattttttattttattttggggggttttctttctctcttttttggctagctaaatggtttgttgattttgtttatctttttgaaaatgcaactttccatcttggtcttttggttttttaagtctctattttgtttatttttgctctaatctttattatttctttctaatatgatttacatatttattcttggccaaatctcatgttgaattgtaatccccagtgttggaggtggggcccactggaaggtgattggataatgggggtgaatttctcatgaatggtttagtttcatcactttgttggtgttctcatgacagtgagtgaatttttgggagatctggtcatttaaaagtgtatgggggctgggcgcrgtggctcacacctgtaatcccagcactttgggaggccgaagcgggcggaaatcatgaggtcaagagattgagaccatcctggccaacatggtgaaaccctgtctctactaaaaatacaaaaattagctgggtgtggtgatacacgcctgtggtcccagctactcaggaggctgaggcaggagaatcayttgaacccaggaggcggaggttgcagtgagccaagattgtgccacagcactccagcctggcgacagaatgagactccatctcaaaaagataaataaataaataaaaaggtgtcaggcacctcctcttgtaggaagcatatagtcggatcttgttttattatacattccaccagttcatatcttttagatggggaatttaatccttttacattcaaggttattatttacaggtgagaacttactcttgttattttgttatttgttttctgctgttttatatgtcctttttgtctttttcctttttcttaattgtttatcttgcagtttggtggttttttgaagtgatatgttttgattccttttcttttctcatttgtgtatctgcactgtcagtgttttatgcttccccatgttttcatgatggtagttatcattcttttgcttacagatgtaggactcccttaatcatttcttgtaatgccagcctagtggtgatgaattctctcagtgtttgctttcttaggaaagactttatttcttccttatttctatagaatagctttgatcggtatagtattcatggctagcaatttttttctttcagtgctgtgaacatgtgattttattctctcttggcctgaaggtttctactgaggagtctcttcttagtctaatggggattccctaatatgtgacctgatgcttttcctatgctgttttacaattctttctttgtctttgacttttgacagtttgactataatgtgcctcggagaggaccttattggtttgaaattttctrgatttttgagcttcctggatttagatgtcyatatctctcccaagacttgggtagttctcagctattattttattaaatagtttttataggcctttttccttgttttctttttctgggattctcatartattaatatttgttcacttaatggtgtcccaaagtcttgtaggctttctttgttcttttttatttccttttcttttcttcctgttttttctcttttattcttttgtctgagttatttcaaaaacttgttttgaaagtcagggattcttttttctgctttatytaatctgttattgagatttttctgttctatttttatttcatccactgaattcttcagctccaagttttctgtttggttctctttttattatgtctatccctgcattgaatttctcattgagataatgattttcttctattttatcgaattgtctatttgtattattttgtatcttgctgagtttaagatttttgctttgatttccttttttggcaatttataaattttcattttggtgggtaaattactggggaattgtgtctcattggtggtgtcatgtttcattgcttttcatcttggatccctgtgttgatatctgtgcatctggtggaacagttgcctattccaattttgtagaggggctttcgttggggaagactttcacctgcagatgtgttttagggtctcagttgggtggggtatgttgctttgttttgaaggggtagcatagtgtagtctccatgcagtttcttcagctgtagtcagtgttggcaaatgcctgcaagtgtctcagtggcttaagctgcagagttgtgtgaggctggcctacctactcagggtctcctcccttgagagtggggcacttggttggttaatgctccagggaagtgtggggctggtcagctgacagcttggctcaggtgctactcccctggggccatgtgctggcctggtctgtgctcagggaaaacatggaaatggttggcctacctcttggcttgggcactgcttccctaggggtgaggtgtcaggctagtccattctccaagggagtgcagggctgattggccatcggaatggcttggatgctgctcgcctaggggtgggataccagggtggtccgcactccaggaaagcagggagctagctggctggtggttctgcttggatgccagtcccctgtgggcagggcacttggaccaaaggtgttcttgtggatttaggttttgagtggctgggattgaggtgctgcaacccttgggatggggaatatggagcaccctgggcagcttgttttcaggagtttggaagctgtatcatctcagcttggtacacacttaaaatttaggttttgtgttttggttatgtttagacataatgcctaatactatatatgatatgggaactctcatatacttctggttgggaatataaaatgatacaactttactggaatgtaatttggtgttataatatcagaagctttacattgtctcatatatcttcttttacttcataattatttgattagaaaatatgtcttgagggaataattatatgtatataaatatttatctgcaaatatatttattgcattatttatgattaataatctaaaacaacccaaatattcaacagtgattaaatattattttatatttatacagtatagtcttatgaagtcattaaattatttacaaaacattttaatgatgttggaaaacacttacgttgtaatagtaattaaataaggcaggataataaaactgtaaagaacatgatttcatatatttgagagagaagagagaaaatttgaaagagtgtgtttgagtgtaatgggggatttggtaaaatttaaaaaaaagattctgatttagttttcatttctattttctgttttaaaatttttttcctctaaagtccatgtacaattttcataataagaaaagctaatgcatcctatttttaaactaacattgttagaattagggagaagatggttcatttataggaaaggatatcatgtttgcaagaaaatttgtaatggcatgaggaaacataataaagggagaaatctacgaaagtattaataatgcattgacaaaagtatagaagggaatacagaaacatattagtctttcttctggttctgtaatatgataaaaacatttataaagctgggcatgctggtatacacctatagtctcaactacttgggagagtgaggcaggaggatttcttgtgcccaggagtttgagtctagcctgggcaatgcaatgagaccttatctctaaaatataaaacaataaaaatataaaatttaaaaaatttttctgcttttcaatttttctggaaagaaatatatcttaattaaaggaaaagaatttaaaagcaggctgatactcgagcattttgaggtcatatttgatgtgaaatgacattcaaaatttcagggagttaatttttttctagcagcacattgaatgatgctaaaaggaaacaaaatgggaaaaaatggaaagagcattagactgttgcacaacgttgatttagtatattttgtttattcatatggaagggcaaactcattcagcaaactttgtaagagtaccttgtaggtgcagagaaaagtactgctcacttatggaatgaagtgggaaaaaagtaaaaacatttttacttttccatttttctggaaagaaatacataatgttttggctggtcatggtggctcatgcctgtaatcccagcactttgggaggccgaggtgggcagatcacctgaggtcaggagtttgagagcagcctggccaacatggtgaaaccccattttctactaaaaatataaaaattagccaggcgtggtggcaggcgcctgtaatcccagctacttaggaggctgaggcagcagaattgcttgaacccaagaggtggaggttgcagtgagccgagattgtgccactgcactccaacctgggcaacagagcaagactccatctcggaaaaaaaaaaacaaaaaaaaaaaaacaggaaaagaaaaagaaatacatcatgttttaattaaaggaaaagtattgaaaagcacactgatactagagaattttgaagtcacatttgattatgcacaaagaaggcatgatccttgttctcaaggttcgtactattcagtatggaagataaaaggtattcacaaagaactaataaagttaacgtatttaaagtgacatatttgggtggccaaggattgcttgaggccaagagtttgagaccgtcatgggcaacacagcaagaccccatctttacaaaaaatacaaaaaaattagccaggcttggtggtatgcacctacagtcctagctactagggaggctgaggcaggagaatccctcgaacccaggaggcagaggttgcggtgagtcatgatcatgccactgcactgcagtctgtctgacagagcgagactccatctcaaaaaaaaaaaaaaaaaaaaaaaaaaaagaaggacactatggaaatagtggtatttgaatgggctcttagagaatgggtctgatttcaacagtttttcatgaaaaggatgtgcatttcaggtagaggaaagatatgagcagagaaacaaaggtgayaaggtatgggagcaatttttagatcaatgaaaactttttttaaaaccagcttttaaataatactttcaatgtacaatttagtggttttttagtatatttaaagagttgtgcaaccatcaccaatacctaattgtagaatatcttcatcactttaaaaagaactctgtaccattaatagtcactctgcatttcttcttctctctcacccctggcaaccacatccattttctttccctgtggatttgcctrttcttgacatttcatagaactctatcatacaaaatgtggccttttgtgactagcctcttttctctttgtagaatgttcactcatgttttagtatttatcagcactttatttttatgacttcactgccaaataatattccacaatatggatataccacatccatttgtttcccttttcatcaattgatagaaatttggggtgtttcaactttttggctgttatgaataatgctgctctggatatttgtttaaaagttttatatggacatgttttcaattctcttgggtgtatagctgggtgtttacttcctaggtcatatgttaattttttgtttaaatttttgaggaactgttaaattggtttccagagtagtggtaacattttatatcctcaccagcaatgcatgaagattccgattcctccacatacacaccaatacttattattgtatatcttccatggttacatgacttggttttctagtgtaccttggagttggagaatggaagatgggaatagagaaaattaaaatgccatagagctctctattcttagcaagattcactcatttttcttgaataaacacttctcgattattgcaagtctttggttaatttccagagctccagaagaattgattctgacaattttgctggtgttcttgttkcttttaggaaacagcagattttctaagattcttacactaccattctaaagttgctttagtattcttctaaagttgaatactcctttttgttcgtttttatgccaaaggtaggttgatgccagacattgatgagaattgctctttctttttaggctactgagcaggggtatgacctgctatgccttgatcagagctatggtttataaattggagcaaggaataaaggcctctgtatatttagaggtgctttggtttttgttgttggtttttttcctttccaacttttattttaggttccagatatacatgtgcaggtttgttacatgggtaaattgtgtgtgtgtcacagggsttttgtgtacaaataattgtgtcacctgagtaatcagcataatacccaattaagtagtttttaaaatcctcaccatcctcccactctccacccttaagtaggtcccagtgtctgttgttcccgtttttgagtccatgtgtactgaatatttagcccccacttataagtgagaacatgcagaaccaaatactgtttttctgcattatatcttaggattatgacyaccagctccatccatgttcctgcaaaatgacatgatctcacttttttaatagctgcatagtattccatggtatgtatgtaccacattttctttgtctaatctaccattgctgtgcatctgggttgattccatgtctttgctattgtgaatagtgctgtgatgaacatatgcatgcatgygtctttatggtagaatgatttattaatacatttctttgggtatataccagtaatgggattgctgggtcaaaaggtaattctatgttaaattctttgagaagtctccaaactttctacagtggctgaactaatttacattctcaccagcagtgtacaagcattccctttcctctgtaacctcaccagcatgttattttttgagtttttaataatggccaatctgactgatgtgaaatggtatttcactgtggttttgatttgcatttccctaatggttagtgttattgagcatttttttcatgtgcttgttggccatgtgtatgttttttgagaagtgtctgttcatgtactttgcccgttttttaatgaagtttctcatttttggcttgttgatttgagtttcttatatattctggatattagaccttggttggatgcatagtttgcaaatattttctcccattctatagggtgtctgtttactctgtttacagtttcttgccattcagaagctctttagtttaattaggtcttacttgtcgatttttgtttttgttgcagctgcttttggagtctttgtcttgaagtctttgcatgggctgatatccagaatggtatttcctagattttcttttagggtctttatacttttaggttttacatttaagtctttaatccatcttgagttgattttggtacacagtgaaggtaaggatccagtttcaatcatttgcatatggctagccagttatccccaaaacatttattgaatagggagtcctttccccattgcttgtttttattgactctgttgaagatcagctagttgtaggtgtgtggatttatttctggattctctaacatgttccatttgcctgtgtgtctgtttttgtaacagtaccatgctgttttagttactgtagccttgtagtatagtttgaagtcaggtagtgtgatgcctccagctttgttctttttgcttaggattgctttggctattcaggctcttttttggttccaattgaattttagtgcttttttttttttctaattatgtgaaacatgtcattggtagtttgataggaacagcattgaatctgtgtattgcttttggcaatatggccattttaacaatattgattcttcttatcaatgaggatggaatgtttttccatttgtttgtgtcatctctgatttctcttagcagtgttgtgtaattcttgttgagagatctttcacctccatgattaggtgtattcctaagtattttggtttttttgtggctgttgtgaatgggattgctttcttgatttggctctcagcttggatattgttgatgtatggaaatgacattgattttgtatgctgaaactttgccgaagttatttatcagatctaggagcctttgggcagagactggagtttcccaggtatagtatcatattgtctatgaagagagatagtttgacttcctttcttcctatgtggatgccttttatttctgtatcttgcctaattgctttaactaggactccctgtagtgtactgaataggagcagtgagagtgagcatccttgtcttgttctggttctcagggggaatgcttctagtttttgccccttcatatgatgttggatgtggatttgttgtaaatggtgcttcttattttgaagtatatacctttgatgcctagtttgtttttagcacaaaaggatgttgagttttatataaagcctttcttgcggctattgagataatcacgtggcttttgcttttagttctctttatatgattaatcacatttattgatttgtgtatgttaaaccaaccttgcatcccaggaataaagcctacttgattgtgatggattagctttttgagggatgtgctgctggattgagtttactagtattttgttgaggattttttacatctatgttcatcaggaatattggcctgaagatttcttttttcatttcatctcttccaggtattggtattaggatgatgctggcttcatagaatgagtaagggaggagtctcttctccccagttttctggataggtttaataggataggtagaactcttcttcatctggtaggattctgctgtgaatctacctggtccagggctttttctggttgatagtttttgtattaccgattcaattttggaactcattattgatctgttcagggattcaatttctttctgcttcaatcttgggatgttgtatgtttccaggaatttacccatttcttctaggttttctagattttatatatatatataattatatatatttatataaatatataaatatatataaatatataatatataaaatataaaaaatatataaaatatatatataattatatatatattttatatatatttttttctaggttttatatatatattttctaggtttctaggttttctaggtwttatatatatatataaaataaactcctatatatataatgcttaataaactgtatatataggagtttattaagcattatatatatataggagtttattaagtattaacttacattatcacaaggtcccgcaataggctgtctgcaagctgaggagcaaggagagtgagtccaagtcccaaaactgaagaacttgaagtccactgtttgagggcaggaagcatccagcatgggagaaagatgtagactgggaggctaggctcatctcgtcacttcatgttttctgctttacattcgctggcagctgattaaatggtgcccatgcgattaagagtgggtctgccttccccagccctctgactcagatgttaatctcctttgacaacaccctcacagacacatccaggatcaatattgcatccttcaatccaatcaagttgacactcagtattaaccatcacaggtactataaactttcctcttaatactgctttagctctgtcccagagaatctgctatgttgtatcttgttttcattagtttcaaataatttcttgattcctgccttaatttcattgtttacccttaaktcattcaggagcagattgtttaatttccatttaattgtatggttctgagagattttcttggtattggtttctgtttttattgtgctgtggtctgagaatgtggttggtataatttcrgtttttaaaaatttgttgagaattgctttgtgttctagtgtgtggtcaattttacagtatgtgccatgtgcagatcagaaggatgtatatgctgtttttgttgggtgcagtgttctttagatgtatgtttagtgtatttggtcaactgtcaagtttaagtctccaatattctgcctcgatggtttgtccgatactgtcagtggggtgttggaagtttcccactattatcatgtggttatctatgtcttttcgtaagtctctaggaattcatgttatgaatctaggtgctccagtgttgggtgcatatatatttaggattgttaagacttcttgttgatttgaaccctttatgattatgtaattcccttctttgtcctttttgatcattgttggtttaaagtcagttttgtctgaaataagaatagcaacccctgctcttttttattttatgtttgcttgttggatctttctccatccctttactctgagcctttactttcccactgtatgtgagatgggtctgttgaagacattatagcgttaggtcttgcttatttattcaacttgccactttgtgccttttaggtgggatgcttaacctgtttttcttcatggttaatattgatatgtgcagatttgatcctgtcatcatgttgttggctggttgttatgtagacttgtttgtgtatttgctttatactgtcgatggtctttgtatttgagtatatttttgtagtggtcagtaattgtccttcatttctgtagtactcccttaaagatgcaaggacttcttgtaaggcacatcactagataataggtaataaattatcttagcatttgcttgcctgaaaagggtcttatttctcctgaagctagtttggctggatatgaaattcttggtttcaatttattttccttaaggatgctgaatataggcctccatactcttctggcttgtagggtttctgctgaaaagtctactgttagcctgatgtggttccctttgtaagtgacctgacccttctctctaggtgcctttaatattttttctctcacattgatgttggaggatttgacgactgggtgctttggggatggtcatgttgtatagtagcycacggcagttctttgaattttctgaatttgtatgtcaacctctctagtgaggttgggaaaatttttgttgacaatattctcaaatatgtttttcaagttgcttgctctctctttctctctttcagggatgccaataagttgttgatttggtctctttacataattccatatttcacagagactttgttcagttttttaaaattcttttttctttatttttgtctgagttaatttgaagaactagtctttgagctctgagattcttttctcagccttgtctattctgctgttaatacttccctttgtgttatgaaaatcttgtagtgagtttttcagctttatcatctcagtttgtttctttcttaaattgagtgttttgtcttttattctcttgaatcatttgattggattcgtcagattcattggaataggtttcaattttctgttgaatcttgattaatttcattgccatccagattctgaattctacgtctgtcatttcggccacttccttctggttaggaaccattgctggggagatgttgtagtcatttggaggtaagggagacactctggcttttagaattgtcagagttcttgcgttggttctttctcatatgtgtgggctgatgttcctttaactgcgatgtaatttgagtgtagtcagttgacttcatttctggatgtttttagagggccgaggctttgtgcagagtctgtatttgtgcctgaattcttgtccttggttccccagaagcgtatattagcaaagtatttttggtgttgatgtttgggctatgatccagtagatggtgcttaaacataatggcctgtaggtaggttcttgctcagccatgtggctcctctgcatttccttgcatgtgcagctgtgctccctttcagtggtctgagaatgtcagctcctctcacacttgagtgctggctgcagatctgtttggcagtgttgtgctatatactgtagccctggatggagctcaggctttgtgctccctcccaagcttggaaccttggcagtggcgatggcagagagcctttcacttgtttcttgaggctccaccccagagaaacacaaagctgcctgacaatcagaacaatcaacctggggtggggtgggtgccttgtaggcccaagccaggaaggcttgcctggtgacaaacagaggggagtgagagattcacagggaagaaagacaggcctcttccttgtagggtggctgtggcatactggaggtatgagtaaagtactcagggtctttatttctttcccagtccgagggcagcaagggtagtaccactgcagtggtactggcagaggggctttcagttgcctctgggagctccaccccagaaaaacagagctgttgccagtgggaatgttcagctggggttgggatgcctatgctgcagaaccaagccaagggctctgcctggtgaagactagggaggtggaggctgacaaggaagagagactgggctcccctccacatggtggctgcggtgtgctggaggcacaagtcaagcactcatgtctttgttccttcctcagtctgagagcagtaagggcagtaccactgcagtggcagtgacagaggggctggcagctgcctttgggagctgcacccctgggaaatacagagccattgccagtgggaattttcagccagggggtgggatagctgctttgtgggtctgagccaggggcgctgcctggtaaagaggagggggtgagggctcacagggaagggagactgggctcctctctgtatggaggctgtggtctgccggcaaagcaaacaggcaaagccctttgttccttccccagcctagagcaataagggcagtcctgctgcagctgcaatggcaggggggctgtcagttgtctctgggatgtcctctcctgagagatgcagagttgctactgaccgaattgttcaggccaggccgagaggccctgcccactgaggagtaacatgggcagggtttaggggtactttctacagactaatgaaaatcatttcatggggaaatcatggctccatgacacactggatggacctggggttaggaaaggaaatactgaggagagtatcaagctttactattgcttgtttggaattgggcttctatgtgtcagtttcctaactgggatgattttacctctccatccagaaatattctgttggcctagagaaactttttcaatgccttgtcttcacagatggaggagctataagtagagctttctttagtaatcacatctcagtaaccatgtgcagaaatcaattatcttaatatataccttatcaagttaatttttcaagaacaggtaagaatgagtgagcttagaaagtttaattgggaaaagagtgaatataagaaggtgataggatacctccttcaaaaggctaaaagattaacacatggaaagtaaaagaaacttatttaaatttctgtagaagatagaagtaggaccagtggatcaaagttacaggaaggtggatttttagatctatctaaaaaaggaccaagaaattagaactggcttcttctgttcaaatagtaatcagtgtgagtcacttagggaggttgtcaaagaaattcctgattgggagttgtttgaactaacacacccaaggacctttcttacttgaagaatatgtatgatattttacatgtattgaaacagctgtaaagagaaatgactcgccacaatttcttgcttaaagctttagttcatttctatttattacccaaaagtgtaattttcatttaagaatataagaaatgatacatctcagaattcaaggaaatattatatagataggccttaaaaaaggagggaccagtatggttctgagaaactcagctgagcctttcttttaatgctctrccactgagatgtttagcttccagttgacagtctatgtgcctttaaattcaaattctcaaatgagatactctaatttatttagtttaagttataagtctacccttgattcaatcatctgtagccaaaggagtaagggtcatataacagcaacagggttaaaatggtggtagggatgggcttttttctctggatggtggtcagttgctgctctaagtggagagatgaagtaagtcatgggctagatatctcataagatatttattagatttccaaaaatgttaatggtagaagactatgatttagactgtttgttgtcaatttcacacaaccagtatttatcatatggctactatgtgtaaggcaccatgctggatgattgccagaatgtagaatacaagatattgtccctgccccagggtatttacaagcactctgtccagtagactggtcattatttaataaatcatcctgcttaggttttactttggaagggctagctttctgattatgtagaaaggtgccttattaacttttgaaaaagtttcaagttgagtattaaagatgtttgccttttctaagcatacacacatttaatgtttgtgtagaccaagcctaaaagaccatcacaagctcatactccgagaacaaaaccccaatccgttctccccaaacaaacaaaaatatgagttgaatatcttatttgctagcagtatgttacattaaaatttgtgcttggccaggagtggtggctcatacctgtaatcccagcactttgggaggccaaggtgggcggatcacctgagatcaggagtttgagaccaacctgaccaacatggtgaaaccctgtctctactaaaagtagaaaaactagccgggtgtcgtggcgcaagcctgtaatcccagctactggggtggctgaggcaggcgaatcgcttgaacccgggaagtggaggttgcagtgagccaagactgcgccactgcactccatcctgggtgacagtcagactccrtctcaaaaatataaaaaataaaaaatgtgtgcttgttcttatatgtacataaggtggaaggtaaacattttaagtgtctgtgagctacctagtattctaggcatgtcatatatgtaacatgcatatgatatgcagatagtgtatgcactattataataatataatccaattatagtctttattttcattatcttaaggatatttatatagttcaattgagtcgctaggaaataaaaaaaagttttttaagggtggggccttgctatgttgtcctggctgttcttgaactctgggcctcaagtcatccttttgcctcagcctcccaagtagctgggactacaggtatgcaccactgtgcctggccaagaatatttctttgtttcctgtttctgtgtttaagctgcatttagtttggcagtgtttgaaaggtatcatttctggtttacattcagctcttgtcctttctaccagctgagtgacttatgaacagaaaattatagagtaaaaataatatgacatatatgttaggctctaagcccttcaccttttttttttccttccaaataaagatgaagcagcttgtctaggtgcaatgccatgttaatatcctgtaaagataattagtagctgacttagcatattgcttggaggtttcctgagagaccaactttagctataatgcaagagatatttgatttctattaatacttgaataagtcattggttttatcaagatcctatatttaattataacttggggctggacacggtggctcatgcccgtagtcccagcactttgggaggccaaagtggaaggactgcttgagcccaagggttccagaccagcctgcgcaaaagagggagcccctgtctctacaaaaaaataaaaaattagttgggtgtgatagcttgtgcctgtagtcccagctattcaggaggttgtggtgggggaattgcttgagcctgggaggttgaggtttcagtgagccatgatggcaccactgcactcccgcctgggcaatagagccaagaccctatctctaaataaataaataaatcctggtctatttaaaaccctggatttgttttaaatagccatctaatttttatgctacaaaagagttaacatactttcttgtttttggaatctctctgaccttagaaccatactaactttgccatggatatttcttggggcctatttttccaaaataatcattctctttttttagagtctactgttcattttaattaaattgtttcccactatgctggtatgatttcaggaaaggagcatttaagtcatatgttcaatcaaaacttctgcaggtaaattataacccacttttcttttttatttcatgtggtcttggcaaatcatgttttaattgtggtcaaaatctgcatagaaacatattgtttcattgatttgcataatattttggggcattttaaaaatatacatcaatccccagagatcttaagctctacttgacagtatttagcatttacttctgcttaaactctgatatatttgagaaagcagaaggtaccacagtataatggtatttttccctttattattagttgtagtatataatattastagcagtattggtaaatattttagaatktgaatgagcctgcctttcaaatgaaatctaaatctttmtgttggtttttattttattactactgcatccagtgttatctgaatatttaaagtatattaaaaacattaaagacaaaaagacaaaagttttttaaagtatatattttttctcactgcataggatattagactacatatgtgccatctattttaaaactaatttcattcatcaccatctgttttcaagaaagatttaaggtggcgtatgtgcgctcttgtacttggtctcacaggctctgtctctctaacatacaaatctcctggaagtcaaaggtcatgtcttttcttctttctcctccatcttttacatctggctaaaattatattctgtatgcatgaaaatgataattacatattacctggtagttatcagatagttcacaaatttcctggagaagacataggaacaaaacagggccttctgtgatgaagaaagatgagaaaaatggagtatgacatcaggacacttagccttagtgttcttactcattacttttgtaaacctgtaacattttttcccatgctgttcccttttctgcttcatgtcttgattttcccatttgcaaaataaggatggaaacagttgcttcctgtttatttgatggggaatttaaggatgaatgggctagtgtttccttccccagatgtatcaacttaatcttatttattttctgtccatacttctgattccataatgtccaattgtatatgtgttttcaattcttttatttacattcttttccttttctgggattcttcaaaatcaaagcatgttaatcacatttcatagtgcacttgagtacccaagatactcttcagatatgggctaatgtttgaatagctctatttgcttttgagtgtctatcaaaacccaggccccagaccatcaaagcatgtaatatgagaggtgtccccagcctgaaatgcagatcagtttccaaggtgttaaagctttttctgaaagcctcactttggtctgctcagatgccttcttttcttttaacctagttgagcagttatgaaccaatgccatgatgaacagttgggtttgatcagtgcaggggtctattcaggagcattaactgaaaagtctactttctcatctgaaaaacagatgttttaccgtgatcctcaacatgtatgtgcctggcctctctgatactgattgagaaaaagaaaaacagtttagtagtcaatatctggggtcttcatcagctccaaataaactattaacagttaaatttcaacataagaaaaaatagagggccttgggactctgaaacaaaccactcattgatagaatttcactgaagatcagagccaaagtaatgcctaacaatttataaggttgtgcaggggaagaaaactggtcctgatctgatgtagggagtccagtgagagcaagcacttagttggagactcaaagttctgtagcatggcctggaagaaattagcttgtcctagaagattttgaagttaggcgctaacaattataagcatctatcactttgatatggctctcaaataattaaagaaattttgtcctataatgaggtgcctaaaggatataattgtttagtaatatttgagtactatagaatgtcttccagagagcataggttttgggttgccataactgatactgagttgttttttgtttttctgtctgaagtggccagagattcaaatgcctcttgagcctcctcctcgcatgtgcaagtaggactgtggtcctggcccacaggagcctcttcagctttcctccagctgtggcacaggacatgtgttcggttcactcgatcacattattaagtaacataggtattatttaaaaggagaagagtgagggcggagtcctattttatggcatttaagtttggaaccacttatgtcaaaactcatttctgtgtttatatgtacttcctaatttatttataataagcatgttgaattatgaaggagaatgttatttcaaaattctattggaggctacttagaggctgtggtgacactgaatgagagctctgaaggaaatcatagtgaaacaggaaaagttcccttgtccccgtcgcagggcatgcgacaagggggartggcttgcttcttcagtgccccactgctcaaacctctaggggagwacacagatgggcaggctgtggggctctgaccccacggcagtgtctaggggtaaatgtttacagctgaagccccagtgaatgttgaagaatacgctttgacctacatattgacagaatttactgagttatagagtgataaatacttatttttttttcctaacaattatgtgatgttttggcaaataatatttcttttttctttttctttttcttttttttgagacagagtcttgctctgttgcccaggctggagtgcagtggtgcgatctcggctcactgcaacctccaccttctggattcaagtgattctcctgcctcagcctcctgagtagctgggactacaagtgcatgccaccatacctggctaattytttgtggttttattagagatggggtttcaccatgttagccaggatggtctcgatctcctgacctcgtgatctgcctgcctcggcctcccaaagtgctgggattatagatgtgagccactgcgcccggccgcaaataatatttcttaatttcagttgcatttatttttaaataggaaatacattcacctggttcagaatttcagaggttacagagctgtacgtaggaagaagttttgttttctcccaattccgcaagccatctgattagcccccttgaaggtagctcaagttactagtttcttttatttccttccataaatatttgatatgcataggagaaagwtatatatatatatatgtatttdtgtatgtatgtatgtatgtatatgtatgtgagaatgaatggataaataagcattcctctttcatacagttacttgcttaccatacctgctgttctataccttgcttaatttcacttaacactatgtcttggaattcattccatgttagtacataaaatgctgcttttttctttcttgtggttttgtggtatctattgtatagctgtattataatttttttttaactaggtccttactgatggacatttatgttgttgccagtcttttcattacaatgactaatgttgttttcttagttttcacttttcaattcatttcctaatttagtctgagcctacatattagtgccaagaactgaggtatttattgtgttctgacacatctgaggtatttgcatatagacatctgggtacatatgcacactgctgaactgtctaataatagtctctttccccaggacactctcctaaggtaaaacctatatattggaattcttatgctgtacatatatgctggatcacaactcttactgtcagactagagagtttcaacttttaacctgtgatttcagttattgtgacatatcctatgtttcaattagaagagacaaactttatttggtgagattcaaatagcgttcatgaaaacggtatcttttaataaagtgaggttaaaaaaatgggaaccacctaagatcttagagtgagaggagtagagattatgaaagcagttttactttttgattttagggtctttctatataatttcagcctgtatcagataattccrtttaggacacagctggtacatttaatgatcacaaactctgaaggtagtaactggatgcaataatcacacaacaaagtcattgagtaggtttgttgacttatgtcagattactctaaatcttgatgatattgcctggagcacaaaaaaggaatattgtcacagcaagcaatggaggttttgatactcgatcactggagtattcttttcccctaaattttgcgctcgttgtatcataactgctggtttcttagcctactctgatgttgtgcagaaaattgtacaatacttaaaaaygtgatatctaggaaagaaaattagtagaaaaaagccattagaactgatatatattagcattggtttggtggttacttattaaagataaaaatggagaatatttcatatttcttgatagaaaaaaagtaagttgccattcatgcaagtaaatcatattaatttaggtttttggcattttttttgttttctgagagaaacatgaagagttctgcttatttattttttatcttgagaatgggaacacrttaacaagtacaagcgacaataaaacttactccataactacattatgaactatattaacttactctacaactcgataaccaacattatggttggttaaataaagagagtgaaaaagacagagagggaacgtgagaaagaaacaatctttttgtttcccaaagctgtaagaagcaatgataagacattgagtgtgtacgtgtgtgcatgttggggtattttagtattgtgtttatttttgttgggagtgagcagaaaatgaagccttcagtaaagaaattaataaatcttattagaacttgttgtaaatattttttaaattcctaaagttggaacactaaggcattatttaaactttatctctgttttttaaaatctgagaaacccattaacttttaccctagaaaatggaaagtgtcatatctcattttacagaggaagttaacaggtttattgtcttgttgtaacatcctaatcctgtgacattttgaaatagtgcttttggtagtgccttgtttttgaaactatagacctctggggcactatggacattttgtactagataattccttgtcactgggggctgttctgtacattgtaggatatttagcagcatctctgacttctacccactagatgccagtagcagcactcccttgggggacaaaattgtccccagttcagaacaactgctgtggacatacatggtggtcctacacaactggagtttaaatrtggatcctgaacagctttcatcagtctgatgcacttccccaatatttgtaatcatgaggagcagagcaaaacaaaggcataaatgttggggtaatattttgttttccaaagaccactgctcaatttgggggaaatttttgaagaaacagcaaaggtaacccttggagtctggattggttggttggttgattgattcattcattcaacaaaaatatattgaacccctgctatatatatgcctgcctcaatactgatgacttgtacgctgctgtgtgtgtcttatggcagtatgttaaaaaaaatccgtggataataagtctgatggtagaccagttaagaagctgctagctataacattggtgagaaatgatggttgcctgggttttggtagtgacagtggaattataagaaattttatacagagatatttagaaggtaaaacattaggatttggtgattaactggagaaaggaaggcgtcaagaataatttccaggctttcattaagatgaggactagagtaggaaaaactgtcctttcttttggaataggagcagataattgacttcagcttttgacatttccaattggagctgcctttgagacatccacaaggaagagttagacagtgaacttgggaaataaatggattgtgtctgttttgttccttattgtacctcctgttctttagacagtgtctgcatttctagagacacagagagatttaggctggatgtatagattgggtgttcttcagggtatatagctagtttaattgaaatcaaggaagtagataacattatccaaggagaatgcatagagaagagggcctagtatagcaaccttatgagcagctttttcaagggactgaagagaggagggactggagaagtatgaggaaaatcaggagtgtatagttaaggaagccaaaggaagagagagtttgaaaaagaagggagtgttttatggttctgaattcagctaagagttcaagtaaaatacaaaaagattgtttaaattaaaaaagccattggattttgtaactaaaaagcatcagtggccttttagaagcctttttggtagtctggtagtttcaggagttcagtaaatttggttaaagagttaagtgggaggtgattggataggatcatgggaggtgggaggtcatactttcatgcattctggctacaaagaagagactgaagatggtatgtgaaggtggtattgaaatgggaaaagttcccttgtcccccttgcagggcgtgccacagtggggagtggctcgcttcttcagtgtcctgctgctcaaacctctaggggaggctagatgggcaggctgtagggctctgaccccatggcagcgtctaggggtgaatgtttacagctgaagccccagtgggcgtgtgtcacagagtgctcttttagttttgccgtctgtaggcggcttctgttagctcagttagactcccttccttatctcaaggacagagggctttctgtatcctggagttcttgccttggtgtaatggaataattgaatcactcgtgggcttggagaatgagcgcaaggttttgagtggaggtagctctcagcagatgggggaagccagaaggggaatggagtgggaagtttttcccctggagttgggccgcccagaggccggggctctccaacgactgccccagccaaactccgcgttgttggcttgccggtgtgctggtgcctattagtgcgttcctctcgctgtccagctgcccgtgtgttcctcggctcgtgtgctcctctcaacgtccagccaccatgtgtccgcctgctagggtctcggggtttttataggcacaggatggggggcgtgatgggccagggctgtattgggaaatacaacatttgggcaccaaggcagaagtgcctatactcacctaggcctgtgggcccaggtctgggggtagagccctcgccagggaccacgcgctccccttcccatcacttccctgccccctttctgtatgggatgcagggagggcatgtgggcttgagtatatttaaatgctgataaggagtcaaggatagaggttgatacgagagtggagaaaatggggcaacttgagatgggatgaatccaaagcacagggagaattaatcttaggatggataccctccaaagtcaagggatgttattggtgatgagaaaggcatattctgttaggattaatttctaatattgggggcttcttgagggaataatacttctggggtttcctgaaagttcagaatggcaggcattaaaagatgcctggggccaggcgcggtggctcatgactgtcatcccagcactttgggaggccaaggtgggtggatcacctgaggtcaggagttcgagaccagcctgaccaacatgatgaaacctcatctctactaaaaatacaaaattagctgggtgtggtggtgcatgcctgtaatctcagctactcgggaggctgaggcaggagaaccactggaacccaggtggtggaggttgcagtgagccaagattgcaccattgcactccaacctgggcaacaagagtgaaacgccatctcaaaaaaaaaaaaaagagagagagagatgcctgtgacagcccatactatttctgattccctagggtccactgatccccagagattccattaatttgataatgctctttattttgggtagctggcatataccagaattggaccctgaacctatggattaagtttgggtttggggcctaattctagtctaataatcagagtagcagggtgttctgagaccctctggagacttttcccattgtcaaagtacctctagccagtctaccttaattagcaaagatatcattcccattatgattcatcatgattgactggtctatatgatggattactgattgtagaaaactctggattattatagtattatgcttagaaaaccattctgttcaaatgttaaagggttgacaacagctcactttcttctgtggtttaacggaaagaaagttcgctgtggaaccagaaaaaaaatctggctccatcggtgattgagctatggggccttgaacatcctgtgaggatgttacagagtcatttactctctgtaacattacctggtaatgcctaatgtgcatcatggttagaattgaaggtcatgtatatgtaccattacattgttgatattaaataaataagaactgatagtatttttattgacttaaaataattattttattgacttaaaaataatatttttaaatatttaattatataattattatatatataattatataatatattatttatataattatataatatattatttatataattatataatatattatatataattatataatttattattatatataattatataatttattattatatataattatataatatattattatatataattatataatatattattatatataattatataattatttaaataaaaataataactattatttactactctagggccctaagtgagcacttattgttagaatttattgttagaattccagatcaaaatcaaggatctcatttctccatgaatctaagagctattattggtgatgtctttggtataagtttttgtaaggacaaaggttttgttacagtcctggccctactaaaacgtcttttattgacctgcatgctatcatagtaaatagagagaaaagagataaaattctagactttttaaggtatatggaaataaatcaaatttacttacttacttttttaccgtgaccaatttggatcgctgtcattttccatgaatgtgtctcaggtttttgtttttttaatagagagagttagctgtttcaacctctctttctttcgtctaataactcctcatttttttctccctcttttttcatcttcttcctttctttcagattattggaaactttctcatgttgcagcatttgctgctatcaattatgccagaaaagctttctgtgtactagcagtgttatgggatcgtgtgtgtgtgtgtgtgtgcgcgtgtgtgtgagacagagagagagagagagacagagagagagaggtgggggggagattgagatggaaagagtggcgggggatgaaggaagtgggggagagaaataaatggtgtctggggtaattgtgctggtgttttttcctgcatgagagaagcttcagatgtctgtctggctttggctcagttgctgtatgggcgtaactgaagaaggaggttggggtagaggagaaggcaattaaaactttgaacaccttaaatgcccttcctaattaagtggtgaggatggaaaatgaaataccttcttatgcttcatttctgttctccgtttaaaagtctgtggagggatcagagctcatgtccttagaaaggacagaactttcaaaataacaactctgaaaaacaagtttaaaaaaaatttctcatcattttctgcttttcatgaacttttaatataaagccatcattatttttttttcctgggcccccttacctatatcctctccccactctcattagtcactccaactttgaagcacccaattctctggagtattaatggagacagttcaagtatctaactgctgtttcctttgttcaagttgcttttggtccttgctgggaaatgctctgaaaactgaaccagctactgaacacaaaggctgacggtgttgtccctcctggtaatgtactgtgtgatttgttcccctctcctgttcatgactcattagtctctaagtacagaaaaggttgctcctctggaataaaaggaacggacccagctcggagtcctttttcgccttttcctgtgttttatatgggtgcactcacagttctccatcttcattagtgacccagcagggggctggcacagggttgagactagcttttgctggttccctggggtgtatcagagacctcagaactcaataccctactataaaaataaaatactgtgcttcaaacgaccttttgatggaacaaagccatacatcccaatctgcctgggcctctcaaattgagaccatgccaagtgccagatttgcattttgcacatgccctcccaccatcccctttcccccttcctctaaatgtggttcttttggtagcctcagtgtcaggtaaatgtttatgtgtgtgtgaaaacgcagactttggcaaaagaccttttgtatttaaattacacttcaagatagtagtttcttgtaagagatgtaggcagcagatatttgtgggcttttatgccctaaatgatatcattttagatttatatatgtgggcttttatgccctaaattatattattttagatttatatatgtgagcttttatgccctaaattatattattttagatttatatataaagtttaggaaagtaagcggaaactagaagtgctataaaaaactgagttacatattwaaaattcaagttattttttctggttttccagagtggccaaattattttcttatttaaaacctaggcaccctagagccatgtgtgtgcatgtgaactctactaaagtgagacactgacatgaacatagagtccatcagacctttatatcaagagcttggagtactcagagcatcgtatctcgttaatcttccagcattgatgtgctttagctcttgggaacagattactatacttattttaaagcaacagggcaaataaaaatagggatcttttggtattgaatgaccagcataactttagaaaatccaactctcttatccttcatttttacatcatagttacagtaacaggttaagattagcttttaacagattgttctaaatttctttaggtttcaaaacatattgctatgacatttaagtaatacttttaagactgtatgagacttagggccttggtttgtagagaatattcagttatttaagaaaagttcactttgattctatagtaaaataatgtacaggtgcaaatgtgtgatgttatttttggtttgtacttcaggtttgcaaacataccctaattttttacagaaagtatatggtagactctttattttaaaaaatgttcatagtctgggtctgtatgattttatttattttatttatttatttattattattattattattatactttaagttttagggtacatgtgcacaacgtgcaggtttgttacatatgtatacatgtgccatgttggtgtgctgcaaccattaacttgtcatttagcattaggtatatctcccaatgctatccctcccccctccccccaccccacaacagtccccagagtgtgatgttccccttcctgtgtccatgtgttctcattgttcaattcccacctatgagtgagaacatgcggtgtttggttttttgtccttgtgatagtttgctgagaatgatggtttccagcttcatccatgtccctacaaaggacatgaactcatcattttttatggctgcatagtattccatggcgtatatgtgccacattttcttaatccagtctatcattgttggacatttgggttggtcccaagtctttgctattgtgaatagtgccgcaataaacatacgtttgcatgtgtctttatagcagcatgttttataatcctttgggtatatacccagtaatgggatggctgggtcaaatggtatttctagttctagatccctgaggaaccaccacactgacttccacaatggttgaactagtttacagtcccaccaacagtgtaaaagtgttcctttttctccatatcctctccagcacctgttgtttcctgactttttaatgatcgccatactaactggtgtgagatggtatctcattgtggttttgatttgtatttctctgatggccaatgatgatgagcattttttcatgtgttttttggctccataaatgtcttcttttgagaagtgtctgttcatatccttcacccactttttgatggggttatttttttcttgtaaatttgtttgagttcattgtagattgtggatattagccctttgtcagatgagtagattgcaaaaattgtctcccattctgtgggttgcctgttcactctgatggtagtttcttttgctgtgcagaagctctttagtttaattagatcccatttgtcaattttggcttttgtggccattgcttttggtgtgttagacatgaagtccttgcccatgtctgtgtcctgaatggtattgcctaggttttcttctagggtttttatggttttaggtctaacatgtaagtctttaatccatcttgaattaatttttgtataaggtgtaaggaagggatccagtttcagctttctacatatagctagccagttttcccagcaccatttattaaatagggaatcctttccccattgcttgtttttgtcaggtttgtcaaagatcagatagttgtagatatgtggcattatttctcagggctctgttctgttccatcggtctatatctctgttatggcaccagtaccatgctgttttggttactgtagctttgtagtatagtttgaagtcaggtagcatgatgcctccagctttgttcttttggcttaggattgacttggcaatgcaggctcttttttggttccacatgaactgtaaagtagttttttccaattctgtgaagaaagtcattggtagcttgatggggatggcattgaacgtataaattaccttgggcagtatggccattttcacaatattgagtcttcctatccatcagcatggaatgttcttccatttgtttgtatcctcttttatttcattgagcagtggtttgtagttctccttgaagaggtccttcacatgccttgtaagttsgattcctaggtattttattctctttgaagcaattgtgaatgggagttcactcatgatttggctctctgtttgtccrttattggtgtataagaatgcttgtgatttttgcacattgattttgtatcctgagactttgctgaagttgcttatcagcttaaggagattttgggttgcgacgatggggttttctagatatacaatcatgtcatctgcaaacagggacaatttgacttccccttttcctaattgaataccctttatttccttttcctgcctgattgccctgrccagaacttccaacactatgttgaataggagtggtgagagagggcatccctgtcttgtgccagttttcaaagggaatgcttccagtttttgtccgttcagtatgatattggctgtgggtttgtcatagatagctcttattattttgagatacgtcccatcaatacctaatttcttgagaatttttagcatgaagggtcgttgaattttgtcaaaggctttttctgcatctattgagataatcatgtggtttttgtctttggttctgtttatatgctggattacgtttattgattttcgtatgttgaaccagccttgcatcccagggatgaagcccacttgatcatggtggataagctttttgatgtgttgctggattcggtttgccagtattttattgaggatttttgcatcaatgttcatcaaggatattggtctaaaattctctttttttgttgtgtctctgctaggctttggtatcaggatgatgctggcctcataaaatgagttagggaggattccctctttttctattgataggaatagtttcagaaggaatggtaccagttcctccttgtacctctggtagaattcggctgtgaatccatctggtcctggactctttttggttggtaagctattaattattgcctcaatttcagagcctgttattggactattcagagattcaacttcttcctggtttagttttgggagggtgtatgtgtccaggaatttatccatttcttctagattttctagtttatttgcatagaggtgtttatagtattctctgatgttagtttgtatttctatgggatcggtggtgatatcccctttatcattttttattgtgtctatttgattcatctcttttttcttctttattagtcttgctagcggtctatcaattttgttgatcttttcaaaaaaccagctcctggattcattgattttttgaagggtgttttgtgtctctatttccttcagttctgctccgatcttagttatttcttgccttctgctagcttttgaatgtgtttgctcttgcctctatattgcatttacaaaaaagtagattgtctcttcctccttgctactgcaaacaatgatgtgaggaacatcctggtactctccagggtatgtactgaggggtaggattgtagggtcatcaagcatacacaccctgatggtcactaaatcctgccagatttcttcctggaatggctgcaccagtctgcagcccaccagttgtgtaagaacactcctgctgccctacttctttgccaacattttatatgtttagactttctcttttttccaaactaatgkgtgtaaagtggtatttaattttaagttgcatttctctgattactaatgaaattgagtacctctttatattactagttagttatttggctttttattgttgtgacgatttaagatttcatgttgatgtagatcttaattttgagttggtcaaacatatcactttttaaaatcttatactttataattttagggcccagggccacagagttattttctgacgttttgttttctgttagtcacatttacattcaggccttgattcatcttgtggtcacctttggttatatcagcatcgtttgaggtagcacattcacactctcaaatacagtgtgatagtttggtatgcactagagggccatgctgtatcatggattcattttgaaagagtatttaatgaaaaatataaaagaaggctattcatagcatattgccatttatgaaaatttaaaacacacacacatatatgtaaaacaacacttaatatttttcaaagaaacactccatatccaaagacagatgccagacaattaagtttttgcttatgaaggtttaggaggaaatgggggagtagtgataaagggggtaaaaaaataaaataagccaacagaggccttggacagactgataataatagtataccctgaattgaggagtatgattatccccacagtcagggtgaatataatttaggagagatgacctcctaataggttagtgatgagcaaagctggaaaaagttaattgaagaaaagtagaaatcaaatatttcagttgttctgaatcatgagtaagatgcctataaggaagaaaaattctcctaaatgactacatctggtcatgccttcttagcttttaaagtattttgtgatamacaggaatttatgtttttttcctgaggtgaagctctctgtaagaaggaaagcagatgtttctttttaagtgcttgtatacacctgccacaaggcagactgagtagttcatatggagagcaggctcgggttattttttatgttgcttgtgaaattaaaattcttttcctggcaagcataggtttataattaagtaatttatcataagagttcttttagctatatcaaaaatttgatgatatacagaagcaatatgtgagtggttacttagaaattagatgaatgagttatttcattggcatttatcatttgatgtgtaggtttttcctatttataacaaacattgaacactgactaattacctgcaactgaaagagggttaaaaaaaaaaagtcttagttgagaactgtattctcaacttattttcaacccaccagtgctcttgaagagtatgatgcactccgattaatagaagttgtgctctcttgggatcatgcttaattgtgttacaatataaagaagtcttcctccatggtatttatgggtatgaaaaaaaaagaagtctttctttgccagatatggattttgtacttccctcccttcaatttcatgtatactgttttttgtttttatttttctgattagttcccttggtatctgccctgccccatccccattcattttggtattcacatacccaataccatagtagcactttatatttactttgtttacgcctaattacarcctgcatattctagataaaacaaacagactcagccaggcacggtggctcaygcctgtaatcccagcactttgggagcccgaggtgggcggatcacgaggtcaggagatggagaccatcctggctaacaaggtgaaacaccatctctactaaaaatacaaaaaaattagccaggcgtggtggcgggcgcctggagtcccagctactcgggaggctgaggcaggagaatggcgtgaaccagggaggcagagcttgcatgagccaagatcgtgcctctctccagcctgggtgacagagtgagactccgtctcaaaaaaaaaaaaaaaaaaaaaaaaagaaacagactcagaaaggttaagtgatttttcgagggccatagagtaataagtagcagaaccagaatgtgaagccaagtctaactctaaagcccatctttttcatacttgactatcctatatttttcatggatattstacaaaatccatatttttatagagtatgatgtcttcattacgctcctcaatctttgaagaggattttaaccctgctctttggttcagctattgctgaatattgacacctttaagctgcaccatagaaaatttgtattcaggctccttttagagatgagtacttcgaactctctgctatccagttgctcaaaagtctgtttccaaatgtatttatagaatattgtgtgaatgacttattctccatccatttttctggattgtctgcattttagtttcaggccaagtcgtaccgtccaagagctatgtgcttaactcagctgcttttacctcttgcagaggtactttcttccttcctcctactccttttcgatattaaatcactggccttcaatgatggatgttatagcaaacagctgaataaaattcagtattctttctgtggttgagctttcattgaggagcccacctagtacaccacatcccatcgtttttgagaggacttacagatgaaattcttctcagatctcaaggtcaggaaacaacgattcatgtttttaaaatgcttattatgaatcttatatttgattgtattttcctctttactttggttgccaggaaggctagagccaaatttgcaagatcatctctaatagctgcaaaggaataaatgatatgtgtgtgtgtgtgccagtcttactcctggcattattttcttatctatgttcctgtttgatttcatctttcttaattatttattttgtcagtaatgaatgaattgtcataaactgccaaaaatcattatgctggtgatggatgcaaatatataaataacatgtgtaaggacaattaagctttcctgacttgatagttaaatctcattcctcctagaagtatcacatgtatacatccatcttcctcatttgtttttctcctttattttacttcctacacattttcagttgtttattatggatttctctcttgatgaatgcattcatacaattttagaattgttgagtatcaatataaaaagctattttttctgaaaattagtctccttataatttgtatttttcttaagttcatattttttagtaaaagtgtaaatttcataatttttattaaaacatttgcctccctaaagaaatttaactattttggttttttttttaatctgagaataggagtagggaaatttggagtctctaaggcatgccatgtagaagtttttgaacatttatatagaatggattgactttttctgcttgttcttctgtctgttgcctagtagatgtctctaactggatattcaaatgacacttcagaccatctgaaacttcacgtattatttccctcccaagtaaactagtcacccaaaccatatacacaacagtcagactcatttgctcacagctttaaagcaggttcttttccatttccactgctattacctattccaagtgccttgcacaactttgcctaaggagacactaagaattcttcattgaagagatgaagaaatgaatgaatacagggatgagttttcttcatttcattgcttctgtctagaccactggaaaaacgtatcttcctttattctgacctcttctaattcatgttctacaaagttatcaaaatgttattcttaaaatgcaaatcattcttaaaatgatatacaaacacacatcattccaggattcatttagtttagtgccaaggcctttcatgctaagttccctgcatctttctggtcttacctcccaccatgtctctttactgactttgttgcatcatcacgtggctgcatactccatttcctcccatgtgctgttcattctgcagaacatctcactgaagctttacctggagaactctactcactttgcctgtcggattcagatgtctttcctacttgttctcatagacatttatgtacagtctcgtgactcttttcatattaaactgttatcatgactgacttacttatctaggggctttctcttaatcaacacaggttctttattcctggatggtatccaacattccctgaataaccagtgattgtttattggctgtttgactgaatatagaatagaataagtctgtagcttatagtccattctaaccactcattcttttcataacttttattgagtgcttactatgtgccagcttttgtttaagagattggcaatactatagtgaacaaaatagtacctgcccaggcaattaaaaagtaagcaattagacatacaatgttgggtagcattatgtgtatattaatccagtttcactctgctgataaagacatacctgagactgggtagaaaaagaggtttaattggacttacagttctgcatggctcgggaggcctaagaaccatggtgggagatgaaaggcacttcttacatggcagtggcaagaggaaaaacgaggatgatgcaaaagtggaaacccctgataaacccatcagatctcgtgagacttattcactaccatgagaacagtatgggggaaactgccccaatggattcagattatctcccaccaggtccctcccacaacacatgggaattatgggagtacaattcaagatgagatttgggtggggatacagagctaaaccatatcacagtgttaggaagaaaataaagagggataaggaaattctagagcatatgctcaagcaaggcatatctaaagagggagcctttgagcagagacctgaatgcaatgagagacaagttgtgtccatggcggtgttgctggggaggtggttctgggcagagagaacagcatttctgtgctcctattatgtaccaggctctgttctaggggttctggagacagcaatggagaaggttgttaaacatcagcattgtttattatttaaccatgcagtctgttctttttcaatattatgtcatagttcaaaactcctcctttctttaattgctaggtttaacgaagttgaaaaaccctaacttgggaaagtctctttgttctccccagctgctaatcacttcctactctttgttgtggaagagaacacataaagtcttattatttagaggcccctaacagaataggatactggtcctggggacagatccccaactatctgaatttaatcatgatgctcagggatgtgtgaaagtgtcttaggtgttcatgtctttgacgtttgacctaggttatagatgtctgtgaaattctgtcaccataattagatatagatactactgatttccttttcccagtcttccaacccagcctatgaccctgagtaaaaccttcttaaattcttttacttcagtagcacacaaaaaatcataattttggatcctgttccttgctctgtcacctgcttgctgcagttaagtctgctctgtggcagttttccatttgcaagcagggcacccttccagttaagttgtaaaattttatgtttaagtaagcccctgtgcccttgaagaataggagctacaggaatgtagagtccaaagagaaaaaaaaagaaagagcattcctaagaaaactgtgtaaatttgcaaattcgttttcttctggtggcagctgacaggtggaatgacaacccaaccaagtaacactaggcccttgtgataggagggaacttaatgctgcggttgttctgcttagatggaattgtgtggggctgtgccaatgcctgtattgagaaagcccagtcgagcagaagagtttttggtttctgcatttagaactgccgaacaactgaggaaaaccgattaaatctggaaggtgscagctcacttgacaggcttctccaggcacctttgaggagaatcaaagataaataaacacattttatgagaggagtatggggtgagagggagtgtttggacaagagttaaaatttcaaagggagggggaagttctttttgacttttctcctgattagactcttgcctcatgtctttgttaatgtacaaattagagtttgtccctgtctacatgggtaagcttgatgggaaaggaagaagatagaagtatattttcaaagacctcaactatagaaggtagaaggaaactgatcaaatatgaatttctttattagaaaaaagtggctttaaaaactattttataagtcatattggatactcatgtgcctgtggaacatgcaaaaactctggcctgttgcacagaggtttgattttgaaactgtctaattttatttatttaaatttttttagagacagggtctcactgtgttgcccaggctcttgaactcctgatctcaagcaatcctcctgtctcagcctcccaaagtgctgagattacaagcatgagccactgcacgtggcccaaagtctgtaatttttttcagtaaagattgatggactttcattacggcctggtctagtgtgcagtgagttgccttgaggtcaggtagtacttgacaccccttatttactgggtatggaccctgttctctcatccttccattgtgctttactctttttttctccgtgaacaatttttacttgagcttgacttacctcaaaggggctatgaatattgaattggctaaaaataattcataacattctagatatatggagccttagagatcattgccctcttccccattttgcaaagagtaaataaagtgaagcccaaaagtgttaaattgctgctggcctaggggcattcagctaccaaatatgtatgcaggaactccacccagatcctgaccacactattagtctgttctcacctgctaatgaagacatacctgagactggtaatttataaaggaaagaggtttaattgactcacagttctgcagggctgtggaggcctcaggaaacttacagtcatggcagaaggggaagcaaatatgtccttcttcacatggtggcaggagagagaagaatgagctaaatggggaaaagccccttataaaaccatcagatctcgtgacaactcactcagtatcacaagaacagcagcatgttgtaaccacctccaagattcaattacctcccaccaggtccctctcatgacacatggggataaggggaactgtaattcaaggtaagatttgggtggggcacggccaaaactttatcattccacccctggcccttcccaaatctcatgccctcatacttcaaaacataatcatgccattccaaaagtctggcaaagtcttaactcattccagcattaactcaaaagtccaagtccaaagtctcatccgagacaaagtaagtcccttctgcctaagcctgtaaaatcaaaaacaagttagttactcctagatacagtgggggtacaggcattgggtaaatacacccattccagatgggagaaattggctaaaataaaggggctacaggccccatgcaagtccaaaatccagtaagacagtcaaatcttaaagttccgaaatgatctcctttgactccrtgtctcatgtctaggtcacactgatgcaagaggtgggcttccatggccttgggcagctccacccctgtggctttacagggtacagcctccctcccaggtgttttcacaggctggtgttgagtgtctgtggcttttccaggtgcacggtgcaagctgtcagtggatctgcctttctcaggtctggaggacagtggccctcttctcacagctccaccaggcagtgccccagtagggactctctgagggggctccaacccgacatttcccttctgcactgccctagcagaggttctttatgagggctccacctctacattagacttctgcctggacatccaagtgtttccatacatcctctgaaatctaagtggaggttcccaaaccccaattcttgtcttctgtgcatccataggtccaacaccacatggaagctgccaaggcttgggacttgcactctctgaagcaatggcctgaaatgtaccttggccccttttaaccatggctggaacgaagcagctgggacacagggcaccatgtcccaaggctgcatagagcaaggaggccctgggcttggtccacaaaaccatttttccctcctaggcctctgggcctgtgatgggtggggctgccatgaagacctctgacatgccctggagacattttctccattgtcttggcaagtaacatttgactccttgctacttaagcaaatttctgtagtctgcttgaatttctcctcagaaaatgggtttttcttttctattgcaattttttaaaactttatgctttgcatcctttttaaacatagattccaatgccaaaccatctctctcaagttcagggttccccagatctctagggcaggggcaaaattccaccagtctgttttctaaagcataacaagagtcaactttgctccatttcccaaaagttcctcatctttgtctgagaccacctctacctggacttcattgtccatatcactatcagcattttggtcaaagccattcaacaagtctctaggaagtttcaaactttcccacatcttcctgtcttctgagccctctaagtctctaggaagttccaaaatatcctacgtttttctttcttcttctgagccctccaaactgttccaaaccctgcttgttaccacttccaaagttgcttccacattcttgggtatccttatagcagcaccccactctactggtaccagtttactatattagtctgttcttatgctgctaataaagacacacccaagagtgggtaatttatgaaggaaagaggtttagttgactcacagttccacagggctgtggaggcctcaggaaatcatgacagaaggggaagcaaacatgtccttcttcacatggcagcagaagagacaagaatgaacaaaatgaggaaaaagccccttataaaaccatcagatcatgtgagaactcactatcagaagaacagcatgggggtaaccacccccatgatgcagttacctcccactgggtccctcccatgacacatggggattatgtgaactacaagaaaagatttgggtgggcacacagccaaaccagtcaacccccacaccaatgcatgtcttttgagttgcttagagctcaatattgcataagtggactatagcagtttactttattgacttataaaacataattaataaaataattaaatgtattccctgtataattcaaaacctcaggagttatcataatagtttcaatctctttttctatcatacctcttatgagaaactagaaaataaattaccactttgagtttcagtttgtgtttattttcttgccatgaagagtatgatgataaaaaaacataaaatgaagtggcccagaggcaggcaaccagaaggtgaggaacaaaaccaaaagtaatagattattagatgccagtaactaagattctaaattattactcttacgaatatagtgtgggttgctttaactatttcgttataatgtttatgtctgcacccatttctcatttctttttcctagtgtgcaaagttaatttaaagtgttagtacaaattgaggaagggaagtctctccagatttcattagaggatagactgaataagaacatgtcctacccrcaaggacaaaggagaagaaaatatattcttgactgtttcagaccacttcagataaggaggagacaatttaaaaaattaatttaaaaaaacacattaggatcaaataacccctccaaagaaaggtgttctatggatgagaaatgtaattactgctgtaaaaatgtagggaattttgcacgtttaatatagtttgtctcctattagaagcactagttggcatttttcagtattagggttgtggcttgccaggcccaccctcctgctgtgtttgtttcagggaatagaacttacccagtcgcaggtttcagaagagctgaggtaacctccttcaatgtgacacaagtactgtttatgttggagacaaatcccagaaactcaaggtaacaacgtacacagagtgagagagtatatgcaagagatttttatttggcatttttactgctaacagtctacagaagttttagtatttagtgccagttcaggcttaaggggtagtttctatttctgtgtgattttgaaaggtttaaagaatcagcaaattattatataatagataataaagaataaagattctggcttctatggaagcttgcaaagatatgagggagggcaaacaactgcttctacgtgttttgttttgttttaagaactcaaaaaagcatggtaggttctttgagcaaggccttagttgtcaaaagtttctgaagccctcaaaccaataaatagtattattactaattaaaagagcagataaactgagaaacaaagcacttagacctagggtgacatggtgagaccaaaactgaattctgtgtcttaaaattcagttatctaatctccccacttcattgcatattctactagcagtcattcagtaaagtacctttcatcactgcaggagtctctctgaacacagtggctttggaatagggttatctccagacattgttgacatcatgtctctgctcacataccaattgagtgaatattggcccacatgattcttgtaagtggattacaagaaatccacgatagacttcattcacttttgatgaaaccaagaactttccctcttgagctacctaatgagatactgttatttgtttattatgcagggtacaggttggggcttgttagctctctgaattcttaagcactcaactgaggaaatcaaatgcatgattttactatgcctgcacaggagttggagaaattcataaagtttatactttactagttttcttaagaatacagatgtaaataggctgttaagtctgcccaggcagaactgttgtttcagatgaaacttaatgaccacaccctcccaccccaatggagattgaaacagttggagaaactttagtttgaaaaatatttactttaaactaaactccaggaatcttttttttttttttccccttggtgagaaagatattctcaggtctattcggagatagcaatatctttaaaatcatgcaagaaacaaaatttcggagcttctcagtggttaggaatagcttcggacaatttacctaattgggcttcagtttcctgacctgtataaaacaagaggattggtaaatgctctccaacattgcttgaagctcctaggttctctggttactttgttatcgtcataaaatgataatttaaaaattgatgtatatgcatgattttatgtatgtatgttatatatgtatgattgattatacttgcctatgtatggaaaatttcaggttgttaataagaaactcgtttcttttggagaggaggactatgggcctgggggtcaggatgggagaattttgcattattttatactttctgtttgcttgttttttactaagtatgcattgtttaaagattttaaaaatagattggttttgttattattttaaaaggatgaaaggaagactttcaaattattgtaaaatctatacccaggataataataattggaatttcatttcagactccaagtttaaagtatttgtaattataagtagacttttgcttttattatagtaagaaaagtcttttaaattctcttcttcaatgaaagcaaccacttttgtttggtgaaacaagcagcatttacaagcacagaaacaaggtttagcaatattagtgacaggattatataccttctatttattgggtcctctaaaagatcatcttcctttgatttgcaactatgggaatgaaatagaagtgggaaaaattagcttttaaaccaattagttagtaatgactagtgccaagtttaaagtgtttcagagtgttattgcsgtgttttaaatgtaaaacactagctccctcttaatctttttagaagataaaactgcaggaaatgaaaaagtggtcagttgaaacagcagaaggcattttagaggctgcatatagtaactggacttggattttggtttgagcattcgttttgttctattttcctatttttacaaatatttgtattargttttgagaaactataagaacccagaaactagatgtttctagcttgacatatttgtggggttctttttatttttatcatttctacttttgtttcttacttaaaaaaatgaacttaaggaaatatacagaaaaaataactcaacaatcattttcatttaaaaaaaattagagtactttctagcatggttaatatatcattataatcaatatgaagtagatgtggtaggtttttttatttccagttgttctgtcaaaccttgaacattttgccctatctggcacaatgttttctagccttttccatattcaacaatrtcaagtaagtaaaagttaatttaaaatgaacttcagtgtttgtgtcacattggagttgttaaagttctcctttgttctttccaggtttgcattgcctctggctaaatttatttgtatttccattccatgcagggtatggtagcactgtgattcagcttacttagtacttcattggaacgttgggttatttatgctaaagtcaataatctcatagtgatgatgatgatgataaccattgctgtcacttattgagtccttacttttggtagatactacattagacttttaaaaaactcatttaatgggtattcattgaacaccttttatgccccaggcattgatttaggagccaaatacataatagttaacaagacaaagtcctggcccataaatatattgtttctaatccacataaaaccttgmaaggcaggtattgtcttaattttatagatgagaaaactgaggctacagaaggagaacaaagttttcagcattttatagcctgtgagtgaccagtctatttaattccagtctgtactttgctctgttctcctgcctcaagatagatcagtattatttccctcttcattaagatgtttataracattcaggactggtataracatgcttggctatgacacagttaagctgacagggatataggatgtgaagtctataracaattattcctkttttaccttagtgctccatgagagctagaagagacgctaaaacctagtacttttcacatcaaaaaacgtraaatactaaggaataaattgaacccccaaaagtataagatttgcacactgaaaattataaaacattgttgaaagaaattaaagaagcctaaataaatggaaagatgtcatatattcatgaatcaggagacttaatattgttaagatggaaatactatctacgtggatctacatagtcaacaaaattcctatcaaaaccttaaccaatactaaaattcactgggatccagaatagccataacaatcttcaaacaatcttttaaagaagaagaaagttggaagactcatattttccagttttaatactcagtataaaactatagtaatccaaacagtgtggtcctagcataggataaaaatacagatccatgaattataaatgagagttgggaagtaaactttttcatttttgattaattgaatttttacaagggtgccaagacaattcactggagagtagtctcttcaacacataatactgggacaatttacagccacatacaaaagaacgaagttgaattggtactttacagaacacatcaaatggatcagacacctaaatgtatgatctaaaactataaaactcttagaaagaggccatagagcacaatctttgtgaccttgaaagacagtccacagaaaagaagaaagtaattgcaaatcttacatatgataagggtctagtatccagaaaatatggagaacccttataatataccaatagaaagacaaataattaaaagtagattaataattttaatagattttttccaaagatgatgtgcaaatggccamtaagcacatgaaaatatgctcaacagcatcagtcattgatggaatacaagtcaaaaccataataagataccactttttaccactaggatggctatgataaaaaagatagacaataacaagtgttggtaagaatataaaaaaaatgggaactcacattcctcaaaaagttaaacatagagttaccataggacctggcaattccacacctaggtatatacccaagagaactgaaaatatgtttacacaaaactttgtacataaatatccatagcagcattattcataatagtcagaaagtggaaacacctaaatgtctctcaactgatgaatggataaacaaaatgtggtatatttgtacagtgaaatattatttagtaatgaaaggaataaagtagtgatacatgcgtcaacatggatgaacgttctgttaagtgacagaggctaatcacaaatagctagatgttgtataattccttttatacaaaatgttcagaataggcaaattcatagagacagaagagagataagagattgccaggatctagagagaggcaggaatgggaagggacagtgactactaatgagtatcggktttcttttcagagtaatgaaaatgttctggaattakatattggtgatggttataaaactstgtgagcactctaaaaacactgaattatatactttaaaagggcgaattttatgatatgtgagtaatatctcaataaaattgttacgtatatatwttttaaacctattaatttggcttcggtggwtkggatttagtccaccacttcaattatctgtttgtgtctgggttattgcaattcaagtacaatatagtctcaacctttattgtctatgaggatcttcaattttcattattttatcaatctgctkgtctattgccttactttataccagctagacttattatatacaggcaaaaactgatacagagcaatatgatatmttttcttcttgattccttttttaaaaacttaatgttatattacttttcaaaccaagagtggcatattgttgtaattatatcattaaaaaatgtgtttattttcaagagtatggatttgatttagaaactgcttttcctgcattctctattattcatggcatttgatgaccacacacttgaagtgctccctggccagagcgtaagagtcttgggggtggggtcagtatagaaatgattaatggtttgttaaaatgcaggcaagttgaatatgacttttataatgtggctgtgagaccagcttatggtatgaattcatacatgtctctctcttttgtaaacatgttatcgaagtaggttttatttcttgaatgctctggcctggtgctaatgagatgtgtgagtgtcctacccaaagcattatgtaacaggaagcaaagttttctgagggaaataaraagcttwctagaaagagaagataaaatctttgctggggaatggttcttttccattagcattcccagtgcatttctccagaagtgtgcctaggaatcctctgctgtagttgctagataatattccctctttttcagggtgattggagaaagaaagcagttatttggggcctggagtatatagatagcaaggagccatggttctgaatgtggtgattggcccaggcattcttgctagtgatggaaatagagggctgaacaggaaagagtgggcagcagtacttgataacatgaggcactggtaataccaacttcatgtctggtcttcccatttaaaatggattatattttagcctctcgtcagattgaatgctaagtatccctacagtcaatgcctgcaaaatctttggcgtacttacttcaaccaaaacttaaactcaaagaggaatatagtgtaaactttggtttaactgaacatagaaagatcacacagagagccctggttttattgcttggaaacatgatgagatgtaagtactgtcaatagattggagactctaggcccaaatttcactgaagttcataaatgtctgctaatttcagggaccatcatacttaggagctagtatactaagaaattggaaagtaagtttaacatgtcttttgtgaaaggtggaaatttaagatagggacacagctgtctgcaagggacagtaggcttgttttttgaggcactctgtggcattcaagatcctaggggatttgaaactcagagaatggtacagtgaacataagaggggtggaaaaaagtggaggatgaagtggttatctgtgtcaaaaggaactgaaaggtgttcatactgttccacaatcccctcttcttaccattattagttaggtaaagagacaaaactgaatggcttccctttctccatctgtctcaagattgtttcctgccttggttgaaaggaaaagagggagggagcaaagtggcattacttactttggtctctctttttagatctttgggtcccaaaagtcttattggtgagaatatctggtttcataagcagaagtgggaaaaataattattactacttattgaacataagaactgtgctaaacaccctaataacattatttaatcygtacaacttttttgtataagcatttatctataagttaatacatgtgaagcacttagaacttagaatgagagcccattaaatgttaatacccattttggagataagagaactataccttagcattggtagaattttaatacatgattgttaaactcaaaagcccatgatctattatgcgatactgtggctctcttccttaagaactcagcttcctttacaaaaatcttccctgatattctcctctatatgcatttagaatcatacctgtttttcaattctatattttgactaattccaggttgtcagtcctaaatcctcttactctccctgcacttatccctgaggaagttcattcttcagattatcaaggtctggaccaaatttatttagtgagaatgtggaatttttcttacaagattttaaaatgacaagtaagataattacatgaaaggatctgtctaggctctttttgcattgtagggggtggaccaagtaacctttggatcacttccacttgtataattcaccatttcggcaggacagyaacatttcaggccaaagttcaacttttttttattattaaattcttttattgtckccaggaaactagagaaaatgaattcttcacagtatgcttgtgcatgcaacttgaaacggtttgcacactaaatgaaattaaatgaaagacagctgtttgagaaagagctgtcagaaactgattgggttctattagagaagaatagaggccaggaataagttttcagaaacaggatatcagtggttttaaaagcaagcaaatttatacacacaaaagctctcatgtggttgtgctgttacatgtcttttcagttcatccatcttaaattatttgcttttggtgagtaggtgtctgctttcaaggctttctttcacatattgaatgtgtgacagttctctcttttctgagaagtaaatacaacacaaccccactacaataccatcctacgtactttggttttgggtaaactgaaaatccagtaatgttcaccaaactacttcctttgtccagtacctctctgttcctgccaaaatacaaagggaaaggaccatcttgggcaggttgccagaagtgccacctgggtctcctgaaatggctgtcagcaagaagggagcaattacatcccrtaacagactcaaagcagatggtcacctgcggtgataagtattacattattaagcctttgatttgtgattgtactttgtgctttccaggcactgaagttatgttacttgtgcgatgttcctctctgttcccctagacctcattgctcgttgtttggccatgtgttcccatggcttatcctccaaaaagctttattctgcaatcttctaactctcctgcaagaggctagctcataataggatctctgccaggccctccagcagtaggtatggtgttattacatggagttacctttaaaggaatttttaaaagcctttggggctttactgtggaagcataacttagtcacagtataacctcatataggaaattcagttagtgttcagagttaggagtcctagtataacattgcactcattgagatttagtctctggagtctcttcttccattgaatttttatgttttcagccctatttaacaatggtcttccataatgcattgaggctcaatctcaactgtcctcctttgagatctcgcttgccatcccctccacaccttctttattttctgaagatttagaatacaaatttatagtctctcctatagctgaagttaggagtcacttgattcatagggtgcctagctccctggactaagatagatggcagaatgtgcgtagagatacatgatgacacagtcacaaatctaattcttcatgcagatagtctttcaaaattcttagcaaattttaatttttaatattgtgagcctcagctgtagtaattcagatttaattatcatgtgatcatgctggggtgattgtttttagtgcagacataggaaatcaaagttggcagctgggctgcagctgtgccccagctggttttatctgagttgaattcagagggagaagtggcagcatgctcaccagctccagaagatagtcttctttggtcatacaaagcaatacctgctagatgctttttgagctagtgcaattaacacccaattagtgagacttcactataaaggtattaagaacatagtccatgtgtagtggacatgtcatcattgtttctttacaaattaaataaacttgctacgtagaaaatttactttatataattagacagtgttttccctaaattacaaaaacatgctcttaaatttggctgtcttaaagttctctgaacttgtaagattttgacctaccatatctaatttttgcctgaaaatattttatagatgctgagtacaatagcatatttatgtttaaaaatacgaaattggtttattgattttttaaattaattcttactaggaatttacatcagctacttctggctttcctgcaggaaaagaattcttgcagcttagattaatcaatattgtccctattgtaaaagacactatattgaaagctgtaatataattttcaccatgcataataacaaagagtgtctaatatccataattattaagaattttacccatcgaagaaaacaactcataagaaaaatagctaagagttttgaacaagtagttcatagatgaagaattataatttgcaaatcataaagtcactaatatttaaagaaatgcacattttagtatgttctacaagaaggctcttcctcatgcattaaactctcaatgtaaatgtgatacttaatgaggctggtgcaaataaggaaaggttccctcataccaggcattcctacaaattctcttgggaatgagttctcacagtacgacttctggttgaaggctttcccatatacaacatattcatatgatctgtgcaacatgaattctctgctttatgattagagctgattactgtgagaaggctttatgactttcaggaaacaaataagtttttttttccatatatgaatgctctgatgcatactgagaactgattatctggataccagggtgactgaatggagcccttatcacagtcactgcattgataggctttatcttaagtatgagcatgctgggtttcttcatatttgacatttgaaggcttcctcacagttagttcacatataggtttctctcctgtatgaatttagtaacgtagttgaagatgtgatttcttagcaaaagacttctcacagatgccgcattcatgaggtttctctgaagtatgaatcttctgatgagtaggcaactctgatttctgtctgaaggcccaccaacattcagtacaaacaaagagtttctctctagtatgaatattttctgggatgaaagaagacttaatcttttggtgagagttttccacactgaatacatatatatggtttttctcctgtgtgaactcaactgtgccctaggagttgtggtatcaggcttgttttcttattttattctaaatgcttgtgatcattgctagtgacagccttctagtcctgagccacagccaacccttcagcctcactgaacaatgtgattggtactagattatatatatttttgttttatatttgaatatattaaggtgaagttggattattttctgtcacataattgaaatggttccacattacattattggaaaatcatttgttttatactgacccattacctgatattttaccattgaatggcatttttagtatctttgtgtgattgtctttcaattgaagtttttgagggatatatgcagcattttgtcattaaatttgtgcagatacatatgatggtttctctgttatattttataatatataaaacrtgctaaaattgttacagcaagaatatttgttttcttaatcttgttactctcattgtgataagtttcttattatcaaaagtggcctaaatagttatcaacttatgtttcattgtcatgggtttaatgtacaaatagagatattattaatagtatttcccaagtctttaatatttcatttttattggatgtgagatcatctgccagagataattaatttcatattrtttgtgtaagtattatttattgagtgttaatacatagcagatactgtgaagaatattttatgtaccatctcatttaatcatcttagtaatttttagtatgaaactaggttttcttaaaaagtcaggaaacaacaggtgctggagaggatgtggagaaataggaacacttttacactgttggtgggactgtaaactarttcaaccattgtggaagtcagtgtggcgattcctcagggatctagaactagaaataccatttgacccagccatcccattactgggtatatacccaaakgactataamtcatgctgctataaagacacatgcacacgtatgtttattgyggcattattcacaatagcaaagacttggaaccaacccaaatgtccaacaatgatagactggattaagaaaatgtggcacatatayaccatggaatactatgcagccataaaaaatgatgagttcgtgtcctttgtagggacatggatgaaattggaaatcatcattctcagtaaactatcacaagaacaaaaaaccaaacacggcatattctcactcataggtgggaattgaacaatgagatcacatggacacaggaaggggaacatcacactctggggactgttgtggggtggggggaggggggagggatagcattgggagatatacctaatgctagatgacgagttagtgggtgcagcgcaccagcatggcacatgtatacatatgtaactaacctgcacaatgtgcacatgtaccctaaaacttaaagtataaaaaaaaaaaaaaaaaaagacaccaccattcagaacacaaaaagctacagaaggtccaggctactgaaaagcatcaagaccaagctgttgtaagtcmaactgcttttatgattgcattctttgatgaagacaatcccagaaaaaraaggtcatattctttaactcaaagtgcgggaatcttgtgtcagggaactacatattcaacaccacatacaaaacttgagaaagcaaagtcttcaacagcagatgccaaagtggtttctttgtctttacagactagctctgygcatcacagagkggggcatggtgttccacatgggaaaytgttaaaacasaaatcagaggagccatcggtgtcaatacccttcctacaaactgcattattaagargttcagggagtcttgggcacagaccaagccaggagatggataaaatgttaaaaaatcaagcaacttctgctacttctgaaaaggataatgatgatgaccaaagtgacaagggtacttataccattgagttagagaatcccaacagtgaggaagtggaagcaagaaaaatgattsmcaaggtaaataattgaaatttgagtgtgatcttagttgttgtgtggtgtatttgactggtggaaaytattggagagtcagcatgagatgttgtcatgcagtcagtggtatgtgaattttagggttttattagggaactgcaagactaacagtaagaccaacatgctttgtgattttatttgctgatattctgaatttacctgagtttcatacataaagctctgtacatttaaaaggttaaaaaaaaaaaaaaaaagaaactaggttttcaagttggtaatggtttcagactgtctatgtaaagcataagtagcatgatttgaagtgattcattcaaaaaatgtataaaatcagrgtaatagaagctaaattactcaaatcttgctcagatataaaattttttttcagctttcataggaatctgcccttcgattagtgagaaaatacggtcttctgttgaagcagagaatttgacagtmatgacattatattgtgaacctttaagttttactgctttattttctgtaaattactacatttctatagtaatttcgcagtgtaaatgctgaatgaatgtgattagctatatttgcaggcttagagcatctgtgaatacttcctggtttttggttagttgtgtttattcctagttctatgtcctattgaattggactttgcttatttaaagaaaagtctataaagctacaggcaagaaaagttggaatttcttccttggggaaatctcaaatgtagagttwtaagtaaatattaaggttcaaaatgggcaatataatgagcacattygaggaatttgtaagtatttatgtaacacttcatgtttacaaaatgttttacagccatattcattaatttacataagtcccttggaaggtaacaatgttattacatgtgttttattaagcaagacaggtaaaatttaggcaaattaagtggcagaaaggaagagacattaaaacatttattctgtgacttgcgcctatatcmtagagcgtgctcctgcattagggaaataaagaaataaaatgcttctcttttgttatagacttgatcatggtgcctatttgggtaattgtttatatatattcatatagttttatatattttttattttttgattatgagacacaaaggccttccaacacaaatttcaatgtatgaaatatctcaacttaatagctgaaggataagatcctgggttataaattctccattaaatgttgcagttatcatgatcaacagattggtgaatatgtctggtggctgctcagtattggtctagatagaatatactatgggaccaaaaaagatatgaccgtggagagctcactttggtggccacacactgcctgcaggctgcttgttctctgccactctgttttttgggaggactttcctttccctctcatagaatagcaaatttctgctaaaaagtaataaatttgctcaaaatatcaaaaaggtacgattagaatatcttccatagtaaaagagattaaaaataacctagactcttgcattagaaagcagagggagacatgacaaattattgcattcarttaacttttcttttacttactgagtgcccagaaattgctttaacaccctgaggtgtgaccataaggtaatgaggagtgatttttaaaaataaatataccataaggtacactgtttaaatgagtgctattcttcaatgtagccactctttacactaatccaacgatgctgtcattgcaagaaatatttttagaacttgtcctttcgaattgccgttagaagccatttatggactatagaagaaaacagtctcacattgacttaaagtcgcactacattttttaaatcaacccctcccctgcaaagaaatttattacccaaatagattactgaccttttcactaacctttgttctgcatttttttcttttcaaaatcagttctataatttaaaaaataacaatttgccatcaacaaggatatttatttcctttttattttgaaaagagttattaaaaaatctatatcagaaaacagtagacaaaatagtagtttccatatatccttcacccagttccctctaatgttaacatctaatataagtatagtacagttaccaaaatcaggaaattaacaccaataaaatactatttggtaatcagtagacatcatttaaatttctccaattttccccactaatatcctttttctgcttcaggatctaatccagcatcccacattgcatttagttgtcatgactccttatgctkttccaacctgtgacagttctaatgaggacatttaaaggaagtgtgcccctcgcccaccaaaaggaagaaagagccatagactctgaatgtaattccaaaaatatctttgtctctgtagctgtcttgtcaactatgtcttttatttattggattttttgtaacctgtgtaccaaatttatgcagattgcagcaataagaagaagggtaagatgtgcttgggcacaaaggagttgtgaggacaacacatctgtccatagccattgtgcaggtgtattttgagctctgcggatttttttataatgctttcacatttggttcaaaatattttaaaatcttcattatgatttctcatttgatttgatcctcatttataatagctcgtgtgtgtgttgtgtgcatgtgtatgtgtgtgcacatgtgtgtgtgtgtgttcattcatttcaggaactttatctgttaaaattctttgaggccagtgtttaaagtatgttcttcaagggaagattcctatttgctcccatcagatgcttgtgaacacttcaaatgcaggggaaccgccaaacaagttctttttttttttattgagacaaagtctcactctgtcacccaggctggagtgcagttgtgcgatcatggctcactgcagcctcgacctccctggcctcaggtaatgctcccacctcagtctccccacgtacaggcacgtgccactcactaatttttctaatttttttttgtagagacagggtgtcaccatgttgtccatgtagctgagactataggcacgtgccaccgtactcaactaatttttccgatttttttgtagagacagggtctcaccatgttgtccaggctgcagttcttgatgttaatttctttttttttttttacaactattttatcatttatttattttttattttattttattttattattattatactttaagttttagggtacatgtgcacaatgtgcaggttagttacatatgtatacatgtgccatgctggtgtgctgcacccattaactcgtcatttagcattaggtatatctcctaaagctatcccacccccctccccccaccccacaacagtccccagagtgtgacgttccccttcatgtgtccatgtggtctcattgttcaattcccacctatgagtgagaatatgcggtgtttggttttttgttcttgcgatwgtttactgagaatgatgatttccaatttcatccatgtccctacaaaggacacgaactcatcattttttatggctgcatagtattccatggtgtatatgtgccacattttcttaatccagtctatcattgttggacatttgggttggtcccaagtctttgctattgtgaatattgccgcaataaacatacgtgtgcatgtgtctttatagcagcatgatttatagtcctttgggtatatacccagtaatgggatggctgggtcaaatggtatttctagttctagatccctgaggaatcgccacactgacttccacaatggttgaactagtttacagtcccaccaacagtgtaaaagtgttcctatttctccacatcctctccagcacctgttgtttcctgactttttaatgattgtcattctaactggtgtgagctggtatctcattgtggttttgatttgcatttctctgatggccagtgatggtgagcgttttttcatgtgttttttggctgcataaatgtcttcttttgagaagtgtctgttcatgtccttcacccactttttgatggggttgtttgtttttttcttgtaaatttgtttgagttcattgtagattctggatattagccctttgtcagatgagtaggttgtgaaaattttctcctattttgtaggttgcctgttcactctgatggtagtttcttttgctgtgcagaagctctttagtttaattagatcccatttgtcaattttggcttttgttgccttgatgttaatttctaagctgcaggtttttaggccatataagtggtttaagtttctagccctaaatcacattaggcaggttttagatagaaattctcattagggcagagatctttgttacccagtgcctggaaaggtgcctaacaaaaactggccctcaatacatattcattgaatgaaaaaatgaatgaatggggaagacccttgtcccctgccttttttttcctgatatattcagaaccacatctgagaaggacaggtctyctgcttcaaggtgggtttttttttcttagtttgccaactgagggtgtcaccctttgggagcctggaagtctcaactttaagtaagggtcctcatttaatctcttgtcctgcttgggccygggctctgtctgctatcctcccaactctcttgccatgtgcccatttagaacccaggctctagttcattaaggattggcaactgctctcaggaaagaatcctcccaagtttttttccttctgagaaatgttatttttttcagttgtttctggcttacatttatttctgttactctctggctgaaccatgcttaaaaagacatattttatattttaggtgtgatgtactagtcttctgtcatattgctaggagtgtgattctctgtaacaatttctttagagaaggtataatgtaaagtaaaaattaatatggaggaatgggttatagggaagttagtgtccctgagwtcatgaaattatctctttacgcactggaagttatttttttctctcgtgtttcaagttagaactttttattatgtcatagattaatcacactgctgtcacttattgagtgactcttgtgcatcaggcattttacatatattatttctaatcatcataamagctttgcaaccagacttagcagctttattgcaaaagtgaagaacctgaaagccagagcatttatgaaacttttccaattattccaggcagtgagaaattgtagtagacatgttttatggcacctgcttgccatgcttctaagaggcgttattcctccttgttgaggagtaacagccctggtttgtaccatatgaccccatccccatcttctagtcaagtgatctaaggatccacaatccttagcttggtaagtgccctcttgctaacctaaaaacgaaaaagtcaacagcttgctttatagggaattccagaagcatttccataaacttattaagccaatgatcaccyttattcctactatcatttagtattgttatagtagcactagacaaaggagtcttacaagaaaaagaaattagaaataaaaaaaactagaaaggaggcatattaactataccttctaagtaatatgattgtatatttggaaaaaccaagtgattcaactaaaaaatttacaaaaataaaagaattcataatgacagattctgagaaagaagaacattgcggtgggactagaccaatttttgtaaaatgtattaagctacaataacttaaagactgtggtgctggtatagatagttaaatggaaaaaaatgggacatccaaaaataaatgtggaaggagtataagatatatatacatatcttatatatatatatttcacataagataatgttggcattgcatatcacaataaacactggagcattcaataaatcttaccattaggcaaagaaatggagttgaatttatatcttaagccttatccaaaaataaatccttgggggcaacaatgatttaaatgtgaaaaataaaatcaaaaaagtattggaagaatatctaaggttatttaagataatttctacattagaaagtcttttcaagtataatataaagcacagaagccataagataactaactttaaatactaaaaaacaaagtttatgcataacaagaaaatccattgtaagcaaagtcaaatgacaaatgaaaatctggagaagatatttcacatgtatcacaaaccaagactattttccctattgaatagagagcatctacaaataaacaagaaagcaatgaccagcgatgggtaaaggataaggacagatcacagaaaagtaagcacaagtgcttttaaaatttaagaaaaagatatcagacttccctcctgatgaaaattaaatggaaaacatgatatatcatattattgaagataaagaagcttgatcaaaactggctataaagggtttgagaaagcagttggttttatactttttggtggaatgataaattgttagatacaacttctgtgaaggccaatctataaaaaaaacttaaatgcatgtatcctttgactaagcaattccacttaaggaattttcctacatttgtgtttttcatttgagcaaaatgactgacataagtatagttattgcatcaatacttataatagcagaggactggaaacaacttaattgtcatcaataggagactgaatcagtatattatggtactccatggaatatactgtgcaacttgttaaaagaatgaagaagttctgcagtggtaatggaacaaaatccaagatgcattattaaataaagcaaaatgagaacagtatgtctaacatgctctcctttgtataaaacaaacacacacacacacacacacagacacacacacacaaatgcatagcttatctttgttgtaaggttgtttccagggrggggttttgctgtgtgagaaacaggaaaaagagactttcttttcagtgcaaatccttttatgttttatcattttcaggctttgcctgttccataaaaataaaattaaccatataaatgtcaggaatgatcttttcttttctttttttctttctttctttttttttttttttttttgagacagagctgtctcctccagactggagtgcagtggcatgatcatggcttactccagcctcaacctctcaggctcacatgatcctcccacctcagcctcctgagtagctgggatcataggcgtgtaccaccatatctgactaattttcttcttgatttttagtacagtcagtatcttattatgttgcccaggctggtcttgaattcctgggctcaagcagtcttcccaccttggcctcccaaagtgttgagatcgcaggcatgagctaccatacctggacaggaacttagtcttttaaaaagttagatgatatcagctgggcacggtggctcacacctgtaatcccagcactttgggaggccgagatgggtggatcacttgaggtcaggagatcaagagcagtctggccaacgtggtgaaaccccatctctactaaaaatacaaaaattagctcggcatggtggcgcacacctgtagtcccagctactcgggaggctgaggtgggagaattgcttcaacccgggaggtggaggttgcagtgagccgagattgcgccactgcactccagtctgggcaacagagtgagactccgtctcaaaaaaacaaaaccaaccaaccaaacaaacaaaaaactgttggttgcatttcaaaaatctaactgaaaagactttgtgcacaagcaactgcatggaatttcatttatccatcttggataaaaagcctagttggtcctgctatgatttgactctgtgtttcttcaggctctaagtattccaaaatgatgcattagctccctggactctctgtgcatcagagacctaggatgtgctatttaaatcatctggcaaattgatgtgtgggggaatggaactctttcccccattttttaaaaaaaattaaattttgtaatggtggcacattgtataataagcacatatgaagattggagctatcattttggaaatgaccttaaatagaaggaggaaatgatagactcatagtaccatccaacagtgtgggttcagcctattttccattcctaccacagagctgctgggtgactctgagtaagcagtttcatccaattttactgtaagcctttgcattcctaatagaggcacaatagtattggtacctgtcttattcagagagtggcagattaagaagactttgggtgatttctaacttctagcagccgtacacacgaaaaagtctgtacaatatagtgtgtttttgtactcagatatttcatgtgatggctctattttttgaagccatagaataattcttccttaagtaaaacagcaaactakctccttgatgtcactgagtttgtgaattattttcgttcattttgattagtacataggcctcmcaagctattaaggagaaaaaagaagacaggttttcttattcttattttaatgatgagatatatacagttgaaaggaattatgtaaggccgggtgtggtggctcacacctgtaatctcagcactttgggaggccaaggggggcggatcatgaggtcaggagtttgagaccagcctggccaacatggtgaaaccccatctctactaaaaatacaaagattagctgggcatggcgggcacctgtaattccagctacttgggaggctgaggcaggagaatcacttgaacccgggaggtggaggttatagtgagccgagattgtgccattgcactccagcctgggtgacagagcaagactctgactcaaaaaaaaaaaaaaattatatagctttctcaagctctcatgagaaacaggtgacgaagtgaaattttcctgcataatgtcacattggatgagaaatgtatccttatttaaaatgttacatcagggagtcatatgctttatggtgcactcatgccagcagtaacattgttgagctccatatgagacacacagcaaagtggtttaaaaattgcatagggctgtagcattcatttacacaacattcaaaacaaaacaattactgaatcaagcaagtggaaatgcagaatctaagggggtgaaaaaagattgtcttgtgtttacttcttttttaattctctcattgtcttyagttgatattcctctcagatgccagatacctgtcattgttgccagatgactggactctgctggctcatcaaggggctgtggcagtgcttgtttccatgagagctggaagaaaaactgcaatggaaaagcacacgcagtcgttcataagtagctggctgtgtaattctcagtgccctgtgttcatctgaatgtgaacttaatctgatattgcttagaactggggcttcatcaatgcaaatgactgtgcttgcaagctgaacttcaatatttgtgagcagtggcagagcactttggttaatgtgtacatattcaggtttgtagaaaaaaaatctgtgcaatttgactgtggtcagtttagttgccaggagaattggatattcctgggaaaagaaaaaaagtgtctcacttctggagccattgtaaccatgtaggtatttaagaggtttttgttttgttttkttttkttttttcaaagataaatccctttttggatgattagtcagttgatcttaaatatcatgtaattggccatgaaaattgatggaaggctctgttcttagaactgtagctccattgaaactcattctcatggtgtcatttagaaagcaccaacgtcccataggatcacatgaaaacagagtctaaaggagttatcaaaatgatacttaagaagttgaagtaagtcatcccatatctgatcttcatgatgactatcaacacttatgttagatgggcactctcattaatcctggtgttttcccatgatttctctggtgctagatctgatatgaataacttggttgcaataattataatagaagggagattgaattatatacatctttgttttatagctatacctttttttgtgctaataattttttactgtagtaacaacaaaaatcattcttttatcagcttttaaatattcgtattcataatagcacttcccttagtttatgtagccttgtttcctgagcatgtttgctgccttgattctattgttgtgcatgctcttgttctgggggagccatttaggttttgtgtatgccaaaaaaaagtctcatactcagcagttacaaaattactttccttctttatggattactttatattcaagtcctccagtcctaagtcgttgtcagcaaagattggaagcagcagtcagaagtgttctactcctttgaataactgcataaaactatagcccctcaccaaagaaaatgggttttcatgtatgacacgttgatcagcatgagattgctgctgagctggagaagagactgtgcagtgacttacttgacagcagaggtgctttttacttccttagtactcaaactgcagcatctgttccataccagaagtgagcagcttgttttccaatcaaaatggattcttctgcaattgtaccttttttggaaattaggtacactttctaacatatatgttttgaggcccttgagtatttgaaacatttcctagtctactttcccagacttaaaagatatcatgtgtgaaatatgtggaatgagaatctcaaggtgtttgggtggattcgttctacggagaatatatttgcttattgcagtttctcaataaagactttaaagtagctgagggaaaatctaaaagcacctcttcagaactgaaataatttatgtctgctggtatacatagaaccttccagagtataagctaatgagccacctcagataccacctcctttgtgaaaccttctccagcacccttaaaagaaagtagttatcctctgctctgcttttccaaagcmctttgaccctctgtaaaagggcttatctcatatatgtgcctcaaattatattttttcatctctctccctatttatcatggaaatcagaaaggagattttgtcttatttatttttgtatttcccaaactactccacccagaccattgaatgtagctatagatcaggcaacaaccccaacccacctggtttcctcctgagtggtctgttcactccctgtgctctgctaggattatatgctcttaaaagcactattcacatactgtttcaacgatttgtttatatagctgtctcttctattagactgcaaattccatggggataggactaagtcctccatctgtattaacccagggcctagcataatgctgcaacacagagtactcattaatttgtattgaatgaatgttggatttattcagtgaatggtggccttgagtatatgaatgggaaatataggggctcatattccagttagcggtactgtatagtgataattcataaataacaattgtacattgtaacacacacamcacacacacacacacacacacacacacacacacacacacacatacacacagtaatgctttttgtccctggaaaaccacaagtaacaatgaagtattctgctttattatgttgatatcatcatgataggaaggatatgttgcttattcactcttactttaaaacccagagatggtattctgtcatttcttagaaggttaagtagaattgatctgttatcagatagaattaaattttagagttttcattgtatctcatgatggaattgcctgttagtttgtgtccccyaggaatgtaagttccctgtgagtaggtgctataccttctatgctgaggttcctagcatagggcttggagagcatggtagatgatcaacaaatatctattgaatggaacataaaaatgaatgtatgatacaattagaaaaacccataaaaattcgttagctttaaagtgaaaattctttttaccgcttgggaagtatcactgggaccaaatggcttttaagagaaatgtagaaaccttctgaacatggcagtatttagaagctggaatatgagtttggttttgattgttccaagttcttcctttggaagatcaaacttcattcctttagaagcttaatcctttttgtgtctctatctttagcttagattctcacccagagaaatagaccttcaataaagttaatgtgaagagaagtcaattagatcgcaagargagtttctttgcaatcaaattacctggaattttcaggtcaaacctgacagagtgtaggtttcattaaaaaggggcttataggccaggcaccagtggctcactcgtakaatcccagcacttaggccaaggtggatggatcacttgaggtcaggagttcgagamtagcctggccaacatggtgaaaccccatctctaccagaaaatacaaaaaatagctgggtgtggtgttacacrcctgtagccccagctacacgggaggctgaggtgggagaaccacttgaacccgggaggcagaggttgcagtgagcccaaatcatgctgctgcacttcagcctaggtgacagagtgagaccctgtctcaaaaaaaacgtgagtgggggggcttgtagatactgctctgtatctctgctctcaaatgatatgaacttggtaacagatacacagctcttactaagttagcattcataattttaatttaaactctcaagctagttttggtagctctctattttaaaagagttaacatgtagtttttcattgaaattaatttttctttactctgaaaggtaatttcctagagatgagaaggtatctagcctttttctcttcttaggagacacaaactaagccagttgcagtatcatttactactttgtatcttgctcttttttgtcatcaagggcactggtcttgcttctggaagaattcactgtgaatgagaaagccacagaaggatttagctgtaggagatcctttgcttagaggcttttattttatagatgaggagatcggctctgagatgttaacttatttgtttaaggttacacagcaagtccatagtagagcctaaactagaacctaggtctcttggctgcttgttcaagcctctttctactataccttacgagttttctttgtatactgaggtaggatgctcacttccaggcaaacrctgattgctgaaactgagaaactgagaactctatgagtttagagtttggggtgacaacacagctaaaacttaaagacttacacatgtcacattattctttaactagagaataatttagtttaacatcaatttggtagtttaactacaactgctacattgtacctagtgtctggttcagtgtagataccacagggcaacagcagtgaggtgcctgtcacttaaaaggggaaattagattttcccctaaactagaaatcgataagcacagggtcacagtggaaatttacacaattttcttaaatactatgatcttgaaagaataaaagacttgactgcaaaactaaatagcagatattagtcagaaaagatgttggtcatctatagaagcatggacaagatcaaatcgcaaggtaaaggttgcctgtgcctacaagcagagtgtactccagtggttctcaaactttagtatatactttagaattaactggaggccttgttaaagtaccaattcctaggccctatccccagatgcttatggcccaagaatttgcatttctaacaggttcctagatgatagtgatgctggttggggaacaacattttgaggatcattggtctataggtgtgttagttttctactgcggtgtaaccacaaacttaacagcttaaaacaacagccatttattagctcacatttctgtagatagaaatccaggacagtatggctgagttttctattcaggctgaaatgaaatcaaggtattggttggcagtgttcttacctggagctcatagtcctcttccaagatcattccttttattggcagatttcattcctctgcagctttagaactgaagtcttgttttcttggtatcagccagggactgctctcaactcctagaggttgttctctggtccatagagggtgccttcagaggagaaaatacagtagtgtggctgactcaagtgttcctggtctatgtagcaattgattttctctgaggagattaataaatcaacattcttattatatacatcagcctctgtgaatctgcttaatgtgggtctcctcttgctgtgtttaaagattgggttttgaaactgattagctgagatttagatcctggaatgaagataaattcaccaagatgaaaaccaatgttggggaacaaactgggcagccagccctcccttttaggaatcatctctctattgctttacaactgtatttgttcttcaaaattctcattgtatagcatatcttggattaaagccatggttaaaattaaagatctcagaaattcaaacaaaatgtctaataatttttctttagccaatctcctctctttttttgtagaaattgattcttttactgaagccttgagatctctgagcattataaactttctgaactaaagtaagaatcctgaaaataaaatttcaaaggtgaaatggtggcaacttcacttcctatgggaattcctgtaaatatcagagaaaagtgcttggcagtcacagattgttgagagttatcaagtaagcctccataatctactggttcttaatgcctgatctatatggctgactttgtgtgtgtgggtgtgtgtttgtgtgtgtgtgtgtgtcttttatttaccaaattttgttttttcatcccttaggaaaagtcaggctctatttgtttgagtatcagtggctcagaggttcttttatacaaatgtatttagctaattatgtgactcaaatatccaaatttagaattattaaattcctttagagcagattgataaacaggattattgttattttattcccttgtcacattgttagagaataaaactcaatctgtatttctaaagtcagtgacaaccatatcattacattggcaaattttgtagacttaactgaaaccacatcaagcctaaaaggctgcaatgtcacttagaattttaaaagtaaactgtatactatacagctgaaaatatttaattttatagaagttaatataaaatgacttaagattttagttgtctataaaatcaaaatctgcctcagtgtcatgtgcttgtgatgtgggctttggagctgcattaacaaaagtacatgtcaagatcaaagatggacatattcgctgggtgcggtggctcacgcccgtaatccctacactttgggaggccaaggcaggctgatcacctgaggtcaggagttcgagaccagcctgaccaacatggtgaaaccctgcctccactaaaaatacaaaaattagccaggcgtggtgtcatgcgtctataatcccagccacttgggaggctgaggcaggaaaatcgcttgaacccagtgggcggaggttgcagtgagccgagatcatgccacttcactccagcctaggtgacaaagcgaaactctatctcaaaaaaataaaaaaataaaaagatcgacatattcttcctatcgctctctgttctggtcagaccaccttttgtttgactgccatgtgttcacaaagatttttgataaatgttcatttaggagggaaccaatcagattatagattggaaatcaagtcacctgaagtacagttcaacaagctgagattacttagcctaaaaaagagaaaactttggggatatgtttaagatagacttgtttaattatataaactaaccagttaatagcatttcttattggaaggatattaaagagtttacagagtcaaagagaagaaggaagaatcaggctcagaaaggacagggaaagaacagcttaagagggctcagtaaacctggcagtcacattcttctgggcttcactgccaaagttatcacactccagcaactttcagtgtttttgttaagattcaaaactaggggatctggcttgggtcatatgttcactttttggctaaagaatggcagggaatcttgactcataatcccattaggctgcattcagtggggtagaggtaattttcctcaaagatttggggtgctattatcaaaatagtaaggaaatatatgctgtacagacaaaaagtaatgaatatccacaaaggttatgtgatcataatctttgaatattggaaagaggaagatgagccttggtaaggatgtaaggcaatagttggaatatccatggaggcatatrtgtttcaacatcaggaagaacattctaacaattagagctcttaacaggctgtattgtgagttatggacttcttattcatagtaggatattcttttcattgcatgtggtggaaacgtgacttgaactagcttggtaaaaagaggaaattagtggaaagatattaggaatgtctcatgtgaacaaagaaaggattgaacagccaaactgtggagagggcaggcatcccactgggccccagaaactgctagaaccagagactcaaatgcagctttccttatttctctttctttcatctctgcttctctcagagtattagctcattttccctctgcagacttactctctcmtgcacattatgtgaaacatgattgctaagcatgcctgggttatacatctcccaacaatcaagagaaactctctctagcacatttagtgagaaaaaccttggaaaaattctctggtccaggttgggccaagtgcccaattctgaacaaatcaaccaaggccaaggggcaggacccctagtttggttccagtgccttctctggactgatctcgggatggaaaaaattggctcttaggagaactataattgagaaaagcagttcacagaaaaaagagggatgctttttccagaaaagaatgtggggggcaggcaatatagtaattgcatgtattcaaaggttagctcaatcagaaatattagagaaatgaatcttatgttggtgggaatttgaactggaagaacttgaagttctttccaactcagagatgatgtgattctagctgtttttcaggtaaggcaggcacatattggtttatactaggaattttctttttccacgtatttcwactcaaggattactctgtttggaaactgaggaatatttattcagctgtttttgaatttgaggatagaggaaaatgttttattttctaaaaatgaatgtctggtagaagagaagtcatgtatgctttttaaaaaatggaacctgtggctttaaagtcacattaccttcaaagacagtactcttaaatctgaatgatttttttttctttttgagacgaagtctcactgtgttgcccaggctggagtgcagtggcgtgatcttggyttactgcaacctccacttcccgggttcaagcgattctcctgcctcggcctcctgagtagctgggactacaggcgcacaccaccacgcctggctaatttttgtatttttttagtagagacggagtttcaccatattggccaggctggtctcgaactcctgacctcgtgatcctcccgccttagcctcccaaagtgctgggattacaggcatgagccaccatgcctggccaaatcygaatgatttttttaagattattttggcttgttaagaaaacttttttttttaaataattatatattcatagcaaggtacaaagaaatgtacagcgaggtcatatatatccttcacccagccttccccagtgttgacatattccatggctcaagtacagtatcaaaacctggaaaccaatatgggtacaacccataaaacttatttcaccagtaatgcatgcattcatttttgtgtgtcatcatgcgtagctttgaataaccactagcatccatcaaaatgcctcactgtattatcagaagcctctcgtgccacatcctgctagccacacccaccccatctcatattccctaacctctggtaaccgtgaatctgttctccatctctgtaatcatgttatttcacaaatattacataaatgaaattatacagtatgtagccttttgtaattggctttttccacttttcttatggttcatccaagtggttatgtgtatatagaattcatttatttttattgctgagtagtattttgttgtatggatgtaccatagtttgtttaactattcacccttttaaggatatttggatagttttcagtttgggactattatgaataaagctgctctgaaccttcatgtacaaatttctatgagaaaagttttcatttctctgggatatgtatcaaagagtacaatcctgggttgtatagtaaatctatttttagttttaaaaggaactatcagactgttttccagaatggcgattccattttacatttccaccagcagtgtatgagtgatccaaaatcatttagcgttatcattaatttttaaatgccatttttgataggtgatagtaatattgtgattttaatttacatttttctaatgactaattgatgttaaacatattttcatgtgtttacttgccatctatatatcccgcttgagtgaaaggatgtctgtgtatattttttgctaattttctaattgggttatttgatttttttaatgttgaattttgggaatcctcttcgcattctagatacaagttctttgtctgatatatggtttacaaatattttctcccattctgtaaactaccttttcatcctgttaacagggtttttgcagagcaaaggttttacattttgatgaagatgattttatgttatttttatgattaatattttaaggaatgaagtatacattttgcatactttttattgatcttaagaattttaaattgccaaattacctgctctaccttctttttcagctcagacgtgttaccaatgcagatgcagttaaattttaagatgagtaaaaccattgagtacatagtgtttaagtgtagtggaatgtctgtgtgttctactctattctaatacctgcttttctctagtgttttaattaatgtagcaaaggaagatctcactttctgaggtagtttcattttgagtttcagcaagatttaataacaccggaaagaggacatgtgattctacttgtacaatggattattgtaaataaacacctcatattactaatatttttctttctacacaatcccaaccatattagacagtgcagcaacgtcccatgttgctttgtttatataaatttagcctttagcttttccttttggcagcccatttgttcattccagaaatactgcacacctaccagctttgtcaagattgtgctgggttcagggttataatggggaatagtatacacatagacataggttctgccctcatggagcttacaatttggttctcatttcttattatggtaagcttgtattgcctgtcagtatttcactgatttgattgaatatccttacttcccatcttctgtcacagaatcttcctcattcatccaaaacgcaacatgtccaaatcttagtgaatgctttcagtgctttgggagtggttacattccattaagattaaatccaagccaagcaagtaatacttacaagcatgcacaggagaatatgagatgaggagagaaatcctcatacttagttaatttcttgccaagtagagaaattttcagtagagccttaagttacctcagggatggctgaagattctaaatatgagattccaaagtccaccgttcaccatattctataaaaagagactcagccatttgaacaagctagctaatcagatgccctctgcatagttcatatttttaaaaatcttggtcctyatattatttataaaaaaagtgactctatattagttttaaggtataaatgakacacttttcctatctgtaaactagctgatctatttgtagtctggcttaaaatgtgacttgcccaaacataggaaaatcttccaaaacaggatctagactgtgtaattaaaaatcaaaattagttaagaatcaaacgtctgaattgaaaatttaatttttagttaaattatttgctatccagtcatctttaatattttgttttgctgtgagcagggtcacatatgacaaattaaaggtggatcaggccgggcacagtggctcacacctgtaatcccagcactttgggaggccgaggagggtagatcacttaaggtcaggagttcgagagcagcctagccaacatggtaaaactctgcctctactaaaaatacaaaaattggcctggcgtgatggcacacgcttataatcccagctagtcgggaggctgaggcaggagaatcacatgaacccgggaggcggaggttgcagtgagccgagaccacgccactgcactcctgatagaaggaaaactggacctaaggatttgagttttgacattactagtacaagctgtgtgtaactttggggaaggctgctacattagtttcagtttcctattgctatggtaagaaattactacagatttaagttacataaaacaacccaaatttattattttatagttcttgagaattttaaaatcaaagtgttctttaatgactacaaaagctaatacactgttaacctctttccaattctattaataccatcattatctttaatagttgcatggaatccacatggaatgcaccataaatgaatcgaaatcttatgttgaacatttgtttactgtcttttgccattataaacaatattatgatgaacatccctaaatatatgcctttgaatacttgttcaattttattcattggggcaaaaaggtatgcacattttaaagaactacagtccacaggtgttcatgcaattgctgagggttttctgagaaggtgaacaagagcagtctatttcaaaactactgaagccctttttgcatgactgactggcattccctaactgggccttcttcgttgccctgacactgcctgttgctgctcctctgagaaggaatgtgtattcacagatgaggcgctccattagtcatggtgcatttcctgggccctggagacatgggcatgacatcaccaagggccaatgagaaaggattctctgtagcaagctctcaaaactctttagaggattgtagactgtgtgttctgttcctagccctcagggtgtgatttgagcttgccttgctcatccagccatagtctgggcacaaaagtctagcttacagacccaagaagccaggacaagcttgaaaatctgcagagctgcaggcagattcccatttagtatttttttttccagggctcaggttgttattcccagagttttccactcctaatgatgttgttacttcatgtggtaatgggtgggtggtgaaagatgaagtctgcattaaataaaagacatttggcagttaaaatttctgggtaagtataggttggtagcataacaaaatcagaagtacattttaccgttttgttacattgcttttgtgtgtagtttcacataataaaacaacatcttttaacagcaaaggctcctagcaaaatgagtgtggcttaaaatagggcaattaccaaagaactttactgaggggattagtaactcattaaatcttttctcttcaaggagaaaagaaacttaaaaaaaaattctcttttcttgggttttaagcattttggataaaaacttttctgtctttctctgtatctgtctctctctctgctccctaatttatgtatttatttatgaaaatgatttgtggaatttagtcagggataactttgttaattctgcacaccaggaagtctattgaaagacttatttcctaattggcccaatcttttgctaacaaggtataattgtaaaattatctttttaaaaaatagtcaaggaaattaaggctcaaaactcaatgtgagcttacactgaacagacttttatagcttaactcagtagttgaacctaagagctgtgcttttctatcttcattcaatctatgattgaatgagaatggttcttttagtattttttcatgtttaattcctttttgatgaagtcaaagagaaattgggaaaagtagccatctttattagtgtgttatctgtggatgccatatactatggaagaacctgcctctaccacttttaaaaaaatgtttctgcaagataaagatgatttttttttgtaattatagcagcttttatttttaaaaatcacttgaaaccgcatgaatttatccttatttcctaacatatataccagtaattaaaggactttcctctagaactataacatactataagacagggcacttttcaacacttcagagatcctccttcaaagatctctgtgcaattcaaaacatttattactaaaatttcaaaacatctctggagatattctaaatggttttttttttttggcttgtatagatgagaaagttgaggtacagaaagattgaaccttgtactttgtgtcagtcatagaagcagatactrcatacataaatcattcttttatcaaaactcttaagaggacagttctttgtgtctttgtataaaattgttcttgttttcctttgacagcttcaggctttgccttattaacagcagtgcttatttttcaaaaccctttgattgagacaaraaaaaaagcaggttcatctagcctaggcagaactggaagaagccctgaaagggataaattacctaaggggtggcagtgtggggcatgggagcactcccactgcctcactcttagcagagtacttgattcttctcaatcccatcccacaatttctcccacctgaaccaatatttgccagttttctactcgagggttgccatgactcctgatgagttaatattggtaaaacactttaagcctttggaaaaaggtctcataaaagtgtacaattggcactggccctgatagtagtcacaggctttttgagtgggcactaggcaccctcagataaggttaaccagatccctgtttttggcgaggacaggctctagaatgaggtctgctgctgccatcttgagagaacacatctggtttgaaacgttgaaagccaggtgacccttgaagcagccacacagtaatgtctcctcactgcttctgcttcctgctaatttggggagcagcaggtgcctccctgagaaaccctgccagagggttggcatgccatgctgatcgtctcattaagccctaaactttttctacagaagaaaactctcaaaaggcgattccagaatatgacagagagaggtcatgacagataatcagatcagtttataaaaagttaaggatgagtcatgtcactcctaaaggagttggcatcaatttattacacaagaccaaacactgaaggaagaaaagcctttagtctcattaaggagcccagacaaaaatcccacttaatccatcttgcttttccttttcctscaactcagctggtgtgcaggtgtagggcagcttggcagaagatttgaacgtttggaaaagggagtcattactgaaagtcactgacacacacttcccttggaatgctgctgatgtcatggaaaaccaggaccttagcaataacccctaacaaccacagctacagtaaacagtaaatgttacctccaccaaggcattggtttttaaagagttttaacaggccagggcttgccagccacaactcataaaaatgttcttataattttaccctactctctaaaagtgctggataactgctsaggtttctctgccacttgggatgcaaagccaaattcacgtcactttcaaggttcactaatcagaatttacagcatttcttttgcagtcctcttcataccccctgccatgctcacagagttaggtctggtagatttcatactttttcaaagaagtctcttgtcttactgagttgtctcaatttctggtgatggtgtgaattaatgtgccaggttttgactagtgttttattagtctagaggttaggcaaatctggttaattgatagcactcaatctataggttatattccaatcaatttgaaacaaccgggcaaagtggcattctatagttcaaactctgaactgggtattgtcaaggtgaccatataatttatcatcaaaactaggatatttttgaaagtaaaggggctctattaataattactctgagataacagcaataaaccgggactgtcgaagcaagttgagcatagggtcacccttgttactgtgccaagagtcaccatctagctgtcatttattaagtcagacattgaagaaacttgcaggaatgcagaacagtgccactcttctcatgaacattttttgttttagaaaatctagtcattctcataaaaatgttatttatgataagatgttatgagtttattagtgttagttttaaatgaattaaataaatgctttaaaattcatctattttaatttctaatatggtaaatataatcctcccaagtaaaagctctataggtcttcaataatttttatattcttaaagggaacccaagactaaaagttttgagaattgctgctttttctctgcatgggaaagaatatactactaaagcaaaatgataaattccctggcaagagagaccagcttaatcatgattgcatctgctacagcactagcaaaatgtcctgcatatagttagtattctgtaatacataaatatgagtagacaaatctcgtgtgacaacgctgaaaagttgctgtgttttctgacgtttgggtattacattaacattattatttggtttaagtctttgttttttgatattcagtatgtttggtactctttgttaatcttatttcgacacaacaatgatgatgtcatttttccttcgaaagttttatgggatagatcaaatttcctatgaaatgagtatgttagataagaaaacataaagcataataaaagtaggactcctttcttttaacctgcctaactcatgtttatcctttatctcaggtgtcatcttcttcatttggccttcctagaccttcccaggctggtctgcagcccctcccatgtgctttcaaagtaccttttatcacaagacttatgactcagggtcattccattcatatgttggtttccccagttaattttgagtgcttttatgtcagaagcatcctttaatttccttattcccagaattaaatgatgcttggtaaagctattaaagactatctgttacactgaaatgaatataaagaaggaaaaactagttaatttaacttttactagttaatgaagtgttttttttttaaatgtcatatgacatgatttctatagtactggaagaaaaaattttttagagtaaaggaaaccacagtttgaggaaagaagatagattgctttgttatgaccttacatgcagattgatttacatctacctacccctccactctcaaactccttttcagagttagactcttttaagccctttaagggttacgtatttctgagtatgtgatttctgtcaatatcagaaattatttccattggcaaaaaaagttatgaaatgatttctataatataggtttacttttgttgcaagtaacttttcattctttatgtttttctttctttcaaatgaaaatattatcttctatatttaaatttgttccttgagttagaaatataatattttaaatccatgcttaatttaatttagaagacatctccaaggcctaaaattgacttgctgttttgtaartcaacatgacaggataaacagaggccatagtttatttgggaagcagcatgatcgtcatgatttaataatagtgataattatatgtaataagtaaaagtaggaatctaagttttatgaagatggtttttaatgccatgtgttttgcttggttttagtttgggtcttttctctgagtgctgttctgtgcctccacatttgtttctctttttggagaccacacattttggataattacttaccaaacttatatgcaaattattgatgagagtcagaacacatcacagtttttatcaagtctccactaaaaaaggggttgggggcttgcagtgagctgagatggcaccactgcactccagcctgggcgacagagcaagactctgtctcaaggwaaaaaaaaaggcgcggagggcgagggggtggggggggagttattatgctgtctgagatggagtcctaaaggaacactgtgatttctgtggacaggtgactggctggatggggatgagagagctgggtacttgtcccaactttgccactttctaagttttggtgtgtttttagcatgtcaccttacttctcttagctgctattagtgtccccatctgtaaaatcagtctgatcaggctgggttagatgatctccaaggtcttttacaaatcatctaattctatagcttgtgtagtcttctgtcaggatttcttgttcttgaagtccctagttgacagataatggtgtggaaggaaatgatacatggcagagtcctgaatgaccaaaatggactttgtccacacttatgtgctaatctccaaagaagaagaaaatacaaatgggccagcggccaaacatgaaaatggtgacagtgagcaaaacattgaagcagacagctgaaagcttcatttcctggcccggctgccatgagaaatgctgtgcttgccaaacccttcaggctgtcaaggccagaactttggctagctcttattttgagctccccccataccacacacacaaaccacacaggaaaattgtctctctccctttatatttgtgccttttggctacacttctatttatgccaagtccttgcctaatctccttccttccagctgtcactatactctgcctgttgctttctgggggctttgaaaagcagctgcaaccttcagaggaagcgcagggtggttggcattggtggaagggtattgtaagtgtgtgtggactctatcagaaccaaccgtcacttttacctggtttatggacagtccaaacagtgttctcactctctttccttggcaaatgttagaactgatggctttatttttttctccctcccttcatcttcagggattttttttttctcttctacattactcagcctttttgtctgtgaacatcctgtggaagatttcatttatcttaggttctttggccaggctgctcatcatcttttttttccacataaaacatatttacctaatgagagaacttaagatggataaccagagcctctgtactctctcacaagcctagaaatttgacactttctcaattctgacagttcatcccaaaccattggcctcctaaggcccagagagctcttggtcatttgctgtctgtctagccccagctgttggagaactagcttaggtgtactttcacccctggcctgtgttgtttccccacagagcttgtctgcatatgtctcatattggctcttagtgagggcggctgagcaaagaggcacttggttgtcatcattttagaaaatcaaggaagaatctcaggaagcctgattgaagaatcttggctcaatataggggaacaccatgtactatgaaggttttaagttattgcgcttgcacagactgactttgtggccttaatatggaaagcaaaacaagattaaaatctcacacagtcattgtcttttgyagtagagcattgtcttttgttgatgagtagagctttttgagatacaatgagttgttctctgctgctctttctggaaacttcgttaactatcttgccctatacctgkcagtgccaacccacatttctgtttatataaaaggaactccatatcctcttcagaagctagtaaacaaaaaaacctcaaagcatatctgtattggggtttgtctatgttttctcatgtctgtattttgtgttttatttaaaataattaaaatgttaattgattttaacttcaaacagatgaatttgtttgctaaaattctttttttgatgggatcttgtttacctttttgtatactatataaagtcttttttattcatattgggaagataacactacaaagccatttttttccatttctgcctgtataatttcctcaatctttgacttgcttggctatattgtttcaaatacccagttaacctttttattactcatttccttattacatgcttttgcattgtctacaattcatagaatcagtatggtaaaacattagagctggaaaagccattaaatattaactatccaaactccctattttatattaatagatgagaaaaagcctgcagaaggaacatgattagaccaaggtcacacacatgccacagccaggctgacaagtcttctgacccattgtctagtggttttccattataacacctgtgctccatgtgtcaggaattttccaaagcactagtgagaactccatcagagactgcatcctactggaaagggcacaggctttggagctggatagatctgggtttgaatatcttgttctgccacctacgggcggggtacattaggcaaggaaccaaagcttttggggacttgttttttcctctgttatatggcaaaagtaacaagaatactttatggttattgtgggtattaaattatataacctacattaaagtacctgttacacatattatgtttaataagttattataaaaatctgctgttcacagaaaaatgtgatatgtgtaaataataacttaaaataggtatttcattattgggtattctgagcctctcttgttcagtagtattttcttgaagtcagtattaatatgtgaattgagtgaattgtctggaaatgaattactgaaagttatttatatcttgattgtgattcatacatttcccttttctttatggctttcctctgtacttagctgcagtgcatctgcatcctatccaagaacttttgtacaagttgaactcacccaaagaagacatttggagagtacttgggtttggcccctgcttttcatctggctaaacactattagataaatctagaatatatagtctatgtagaatattatgtttacatttttagaaactttggatttttagtgtttttctgaaacttactgaactatgtgatgaacagcttcagtgtgaaattatacgtacttggtctgagtataggtagaagttatgttcaatataaaggggcccaggactgttctgttaaaaggaataaggactacattatttaactagtagtgtggggaggtggaatgagttaggaaacaaaagctaagatggatttagcaaaggccagagcaagaaaagaaagtttaggctgggcgtggtggcacatgcctataatcctagcrctttgggaggccttggtgggcggaatgcctgagctcaggagtttgagaccagcttgggcaacgtggtgaaaccccatctctactaaaaatacaaaaaattagtggatatgatgacgtgcacctgtagtcccagctactcaggaggctgaggcaggagaattgctcgaaccaagatggcgccactgcactccagcctgggcaacagactgagactctgtttcccccccacggccccctcccccacaaaaaagtttagaatcgtcgcaggaggtgactcaggggaatttcatttaagggcctctcaaattgcttgggtgttgttggcttactggaatgccttgagtttgaattagagggaaggaccttaaggaactagacagaattttgcttctctattagaggaccctggcttaggttttaaacggaagttaagtgcaattagaaagaggcactatgtacctaacacgtagtggatccttcatatgaaaccattaattgtcaggggactttgaggctcatataatttggcccataattatggctacataagtaaaagctgtraacactcttagggttttttttaaattgttttttcagtaaaggtgaaagtatagcagtgttgggagggggtgttccttgtgcctatttgtacacaatgtcttagattagattaagagccttaggccaatgattgcttaaagataaaaagcaggcatgattctggagggatattggataatcaaatatgaccaggaaatagaaggtcctattttgctgtattttgggttcatccagatgggatcagaccagaggaatttggcaagcattgagactcgccacttagaaccacactgaaatagttgtggtggcaaaagaatttctccgggagtcttattccacttgaggcataacagccagagattcctggcctttgaggggagagtgccaaagttgatgtattttaaaaacatcaactgagatctataaacctacgagaaatagttgaattggatgacactgggactatgtgtttctgtacttttcttacagaagacatactatgaatacatgtgtcctggaatctacttttaaaaattagttctatgctcatatcctcacattgagatttaatgtatttcagtttaataaatgagaacatataaaataatttacctgtaaggacctgtctatgggaacttctatattctgcttgaaattctgacacattaacctggccatttccaaaaactttctggcaagagctcttcatggacctaataattgctttactgtttaatcattccctgagcctttttatactctagtaaactgcatctgtcactagatttcatcaccatctgtattatttatcccttgtaatctgatatctatctctataatgcccaattgtatccccttcaagtgcccacttcattggcttatatacattaggttttcaataaatatttttatataatggtaaatgaagaagttgttctttatattttaaacaactcttayggaaggagattacaacacagctggaaggaattattgtgagagtgaaacatggaaccaaaaaagataaagcaagggaaattaaaaaaaaaaaaagagctttattgagttataactgacatccaataaacagcacatatttagtccaatttgatgttttaacatatttacatacccattagatcatcaccacactcaagataattaacatgtcttttatccttaaatgtttctacatgacctttgcaatccatgtctcttacccttccttaccttaccctcataagcaaaacactgatctgtttttgtcacaatagattatattacattttctagagttccttattaatggatcatacagtataaactcattttggtcttgcttttttactccaatttattttgagattcatccatgttgttgcatgtatcagtacttcattactttttcctgcaaagtagttttccactgtatgtatatactacatttgcttatccattcatctgttgatggatattttgggttcttkctagtttatggctattacaaataaatctactatgaacatttgactacaaatttttgaaaagaggtatgctttcttttttattgggcaaatacctaggagtggaatcactagattataggattgctgtatgttcagctttgtaagaaactgccaaactgtctgtaccattttgctttctcaccagcaatgaatgagagttcctgttgcttcacatccttgccagcatttggcgatgtcattgctttggattttagtcattctgatacagatgttccccaacttacaatggtttgacttacacttttttgatttttcaatggtgtgaaagcaatatgcatgcagtagaaactatactttaaattttgaatgttgatcttttcctgggctagtgatatgtgttacgatactctctcgtgatactgtgcagtaacagtaagccccaagtcccagtcagccatgtggtcaaagggtaaacaatcagtactgtgcagtgtactcttcaataaattgtatgagttatttggcactttattataacataggctttgcattagatgattttgtccaactgtaggctaatggaagtgttctgagcatgtttaagataggctaagccaagtaagatatgatgttctgtaggttaggtatattacatttatttttgacttatgagttttcaatttacaaagaacttattgagtcataaccccactgtaagttgaggaggatctgcaggtgtgtagtggtatctgtgttacttctttgaagaagtgtctgttcagatcttttactcatttttaaaatcagattgtttgttttcttattgctgttttaagagtcctgtggatgcaagtcctttatcagataggtgttttgtaaaaattttctcccaatatttggtttgtctattcattatcttaacagtgtctttgtcagagcagaagcttttaattttaatgaagcctaacatcaatttttttttcatggattgtgctttaagtgttatattcaaactcattgccaagcccaagatcacctagatttttttctatgttatcgtctggaatttttatagtttgcattgtatatttacttctatgatccactttgagttaatctttctgaaaggtgtaaggtcagtgtttagactgatgtgaatgactatttggtccagcatcgtttgttgaaaagactatccttctgcattgaattgactttgcttctttgtcaaggttcatttaactatatttatgtgagtctgtttctgggctctattttgttctatttatctagttatctatattttcaccaatatcacattgtcttgattactgtagctttgtgaatgtatgcatgtattcatttaagagatgaggtcccactatgtggctcaggatggagtgcagtggctattcatgggcttgatcccacttctgatcagcatgggagttttggagtgctccagttccaatctaggccagtttattcctctttaggcaacctggttggttccctgctttcagcatattgatgctgaactaaatgtggacatccaattggcatagcacacaacagcccagaactcctgtactcaagcagtctttctgctttagcctcccaatagctggractacaagtgcatgccaccatgcctgtcagattactgtagctttatagtaagtcttgaagttgaagactttttttttttttgagacagagtttcactcttgttatccatgctggagtgcaatggtgcaatctcagctcactgcaacctccacctcccaggttcaagcaattctcctgcctcagcctcccaagtagttgggattacaggtatgcgccaccacgcccagctaattttgtatttttaacaagagacagggtttcaccatgttggtcaggctagtctcaaactcctgactcaggtgatccacccaccttggcctcacaaagtgttgggattactggcatcagccaccgtgcccagcctgaagacttttatttctccaactttgtttttctttgtcagtattatgttggctattagtttgtttcctttctagataaactttagaatttgtccatatccataaagtaacttgtttggattttgattgagattgcaccaaatttatggattaagttgggaagaactgacttcttaacaatattgagtcttcttatccatgaacatagaatatttctccacttatttagatcttcgatttctttcatgaaagttttataattttcttacataggtcttgtacatattttgtttggtttatacctaartatttcccttttgttgatgctagtctaaatggtattgtgtttttaatttcaaatyccaattgctcattgctagtatataactaagcaattgacttatgtacattaaccttatatcttatttgtttttggatttgtgtttttatgattccatttacctctactattgttctattagctgtaactccttgtgtagttattttagtgatggccataggatttgacagtatatatctttaacttatcacagtctatcttgaagtgatattataccactttacatacagtataagaaccttacgatagtcttaaagtagttgtcatacattttacttacacataaatatactttagttataaatcccacactgagttttattttagtcaattatctgtaaaatatattttgataataagaaaataaatttaataaatatatattacccagtggttaccatttcctgtgatctttcctttgtatagactgatttactgaatgmgatttacctgaagaattttctctatcaggtcttgtggtgtaggtctccttgtgatgaattattttagcttttgtttatctgagaggtctttattttacctttgtttttgaaagatatctttgttgggtatagaattctagattgatagatttttttcttttagctttttgtagttattgctttattgtattttgacttttattgtttctgactagaaactgtgcttatccttatctttgttcctctgcatatatatataatttttttaatcttgttgtttttgagattttcttttctcttcgattttgagaaattgattgtgatgtgcctttgtgtccttttctttgctttttatgcttggggttttcttgagctttttttgatatgtttgtttagcattttcatcaaatttggaaaaatcttggccactatgttttcaaatatttttcttctctctctaccttctcatctttggggtctcttactacacatatataaagctaactgaaattgtcccacagctcactaatgtcccacagctccattcatttttcttggttttttgtgtgtgtgtgtgtgtgtttcagtttgcatagtttctattgttatgccttcaagttctctaatcatctcttttgcaatgtttaatctaccattaattctatccagtgtatttgtcacctcagacattgtagtgtttaccactagaaatttgatttgggtatttttagtatttctattgacttttcaaacatggactatagttataaagactttttttttttttttttttttttttgagatggagtttcactcttgttgcccaggctggagtgcaatggcatgatcttggctcaccacaacctccgcctcctgggttcaagtgattctcctgccccagcctcctgagtagctgggattacaggcatgcgccaccatgcctggctaattttttgtatttttactagagacggggtttctccatttggtcaggctggtttcgaactccagacctcaggtgatctgcccaccttggcctcccaaagtgctgggattrcaggcgtgaaccaccatgcccagccataaagactattttaatgttctcgtgttatgtagctttgaaatgattccagacacataatttgctgcatgaatgataaaagttttgctgtggtaagaacacagagtgtaatcttcctccccatggaaatgttatatcacaccttatcagaccacatatatgaactcatatatgtcytcaactactggactctaaaacacatataaacccaagattttgacagatacgttgagaatgtaggctgtggcagggctactctctgttagcctttgagttattcttttgagcctggccagccaacatcagcaccacttgctagtgttgagggacttttcatgttgttgtggatccccattgtgttggtcaaatcatcactccctagaatctcttgtaaaaagataygcctcagatgttgttttttgtttgtttttgcttttttaacttaacaaattggtaattgttttaacttttttattaggttcaggggtacatgtgcagttttgttatatagggaaattcgtatcacagggttggttgtacagattatttcattacctaggtactaagcttagtacccaatctttttttttttttagctccyccctcctcccactctcttccttcaagtaggctccagtgtctgttgttctcctctttgtgtccatcagttttcatcatttagctcctactgataagtgagaacatgtgatttgattttctttttctgtgttagttcactaaggataatggcctccagctccatccatggtcccacaaaagacatgatttcattcctttttatggctgtgtagtattccatagtgtatatatatcacattttctttttccagtctgccatttatgggcatttaggttgattccatgtccttgctattatgaatagtgctgcaatgaacatacatgtgctatgtctttatggtagaatgatttatattcctttgggtatatacccagtagtagtattgctgggtcaatatctttaagtgttactgtgccactttacgtatagtataagaaccttaacaatagtcttacagtacttgtcatacatttaaatatacattagttataaatcccacactcrattttgttttagtcaattatctgtaaaatatattttgataataagaaataaatataataaataaatttgaattatccagtggttatcctttccagtgatctttcctttgtacacattgatttactgaatggtagtgctatttttagctctttgaggaattttcacactgctttccacaatggttgaactaatttgcattcccaccagcagtgtataagtgtttcctgttctcctcaacctctctagcatctgttagtttttgactttataataatagccattctgacttgtgtgagatattatctcattgtggttttgatttgcatttctctaatgatcagtgatattgagcttttttcatatgctcgttggccatatatatgtctttttttgaaaagtgtctattcatgtcctttttaatggggttgtttttttcttgtaaattcatttacatttcttatatatgccggatattagacatttgtcagatgcatagttttatgcctcaaactttgactagactttgtattcatggcggcctacttccaccctaattgggcaaatagactttaataattagactctaaatgaaatggaaactcacacactatgaggttagtgtatctcatttattgagtgtattccctaagagatttgttctcattattctccacctgtttaagcattgtgggggagaaaagaatctctttgtcaataagccatgtgattcatgagtcgtattttaatcgtcttcttattttaactatacaaagcaccttgtctgctaactctagtatctgtgtcagttctgagttaatttcaattggttgatttttctcctcactgtgagttgtattttcttgcttgttttgcatgcctggttatctttgattagataccagacattgtgaatttcacctttttgggtgcaagatatttgtattcctataaattttaaactttgttttgggatgcagttaagttacttggaaacacatccttttggatcttgctttcaggatttgttttggcagaactatttaatttaaagctaatcattccccaccatcaaggcaagacccgtctgagtattctatccaatgcttcatgcattatgaagttttccattcttattcgtaaaaataggcattattcttggtcctgtatgagtgccaggcactctaccctctactcctctcagagcattctttctctagcctcaggcagtttccttacatgcatgcactaatcagtactctgatgaatatttgagggagactctctaagatctcttctgtgaactttagctgtcttcttttctctgaattttcagctccttctcctcacttcagggagcctgttggattccacctgtgttccctcttcatgcaacacaacctagaaattctcttaaggtaatggcctgaggaaattgtagaactttccttttttttttttttccctcatctcttaccagatgtccagtgtcttgaaaagacattgttctgtttgttttgtttcttgaaaagtattgttggttgttttaggtggtagggtaaatctggtccctgttacttaatctttgtcaaaagcaaaagtgctcagagatcttcctttaagttttcattggtagttctagaaatgaccaatcacaaaacagggaatctctaactgaaagatccatgacatttcattatagagagttaggaaagagaattaatctgagaattaccattatctagtcttcctcccactcatattcttcataaacatttgcataacacaattttttgtaccattgttgaccatatcaatgggtagattactgaattttggggggaaagacatgtacgagctactagaatggtaagttttgttgaacatgttatataaaaggaaattacgcaaggggagctgggttggtatcatagtatagtattatatttcttttttttttttttgaggtggagtctcgctctattgcccaggctggagtgcagtggcgtgatctcagctcactgcaagctccgcctcccgggttcacgccattctcctgcctcagcctcccaagtagctgggactacaggtgcccrccaccatgcccagctaattttttgtattttttagtagagacggggtttcaccatgttggccaggatggtctcgatctcttgatctcatgatccacccgcctcggcctcccaaagtgctgagattacaggcatgagccaccgcgcccggcctatatttctttatagaggtaaaataggtgtgagatttttgtttttacttattttgctttgttatttgggcttcactggggaaccaagtgatttttggcaagagaagaagcacaaaaaatacagaaaagcctcttcttatggttcctataatggcaaccaagtcaataaatggttgcaaaattcaactagattgcgatagggtagttactgctactgctttatccttttataaatagtcagtttgaaaagtagaaaagttcatgggtaaagagcagtagctagaatgcaaatgtgaatccaggatgcaatatacaaaggtttttgcagttttcagcaagtgtgaagaatttctgattgatgaggccctcagagcagaaagagaccctcctctgtctatgtgtaagattagtaacacatagagacgtggtgttcatctgcccagtttatgtggctaattagcatttagagtttcttcaatagaagctagtgaagtaagaactagataatatcttggaagatctttttgtttcttctgtcttgcactttgaagaggggctcagactgttgaattggaatagaacaattaaacagactgtaaaatgaagtcctgacatgctggttgctttgcctgctctgtcagagcagcactggttccagggagagagaatactagttttgtttatttgtttgtttccagacaatttgctatgtcatcactttttttgtgtgtgcatgcgccaagtgtttgaggttgataatgttgacagagtccttgcagaatggaagttcatctccacagggaaaggctttgtatttcaagttttaaaattccaaaatattttgctataacattgttattcctagttttttatgcctttttgtgtggaaggttggtttctcctttatctacttaccagcttttaggggaatccctttttaagtcaagaaagcaccttagaaaatttctcyctctctctctctctctctctctctctctctctctctctgcctttatgaaactgacagtagcatatcttgctattcttgggtcttagtttggaattaagctgtgcatgcagtatgcccagaaggctcagtttttaaaaaatttctatgtttattcgtatttaacttcattctaatggggtcatgtacactgtgatatttattcatgaaatatttaggaaaagataaaatgtttgaactataatgaattatgattttattatccttttattaatgataatacacccaatgctattcttgaaagtttgaaaatggaaaccttggtaaattttttttcttttggcagaattttgaacttttttacataaaagtgtaaacctttgtttggtattatgggtcacctggttccatagcatctctttgatttaaagaggatatcatccatttaaaaaggactcacagccaggcatggtgcctcatgcctataatcctagcattttgggaggctgaagtaggcagatgcttgagctcaggagttcgagaccagcctgggcaacatggtgaaacgctgtctctacaaaaaatacaaaaattagccaggtgtggtggcatgcacctgtggtccaagctacctgggagactgaggtgggaagactgcttgagcctgggtggttgagtmagcagtgaaccatgattacaccactgcactccagcctagttgacagagcaagagcctatctcaaaaacaaaataagcaaaagggacttactttggggatttggagaactagaaaatattattattcatattaacttacacccataaaagagtgctattaaaagttcacttaatacaagggcttctttttctttgctttggatttaaacaggttttctataagctaatcaacagagatttgattaacatacttaagcatgttatatgaaagggatggcattgtgaaagatggggatactatatagaagtaataaaataaaaggtatggaattaggtagtgtaagaatttcagaactaaaatagtctgagaagtcatttggaacatggatttcttttgacagaaaacttctgtcctgcagtatatcagccttgtccagcagagctggttagtgcagatagaagaacctaggttgcttaactaccagttcactgtcctttctattatattgtaattctgttttctgtcttatttcagaagcagcaatccagatgagctctacatcctgaataaaaacaataataatggcaataacaaactattatttttttaagaaatatgacttaaacctatttgtttttatttatttggtttgtttgtttatttatatgtagtttgtcagaaaaccataggagtcaggcattgggtagctcgtggccattagtattattttcaaagtcagaaatcattggagaagaatccccttctaatataaatttttaaactattcwtytgagtgtttaggaagctgtgatctctgctgtgataatcctagaagacattgctcaagccacagctggctattattgagactatggaaagagaaagagcttttgccctgatttatcccataaaatgaataataggccacattcagggagacctagctygtggcagactattctcaccacacccttcacacagcctttttttttcttctcccatcccaagccaccatcccaacctgccttgactaaactcaatgaacaggaaccattgtatgaatcggaaggaaaatgtcttaaatatatgaagttataatgagttggtaagtgctgtaaaaatactctgtaacttagttggaagttgcatcatccatgcctgtggcactatggactggacccaaatggtataattcttcagtgtaacactgaagtaatttttgcatctgccaagtaaatggtttagatttcaaacctatgaaatgccraactgtaattgttcaattctagtgaaccacagatgtgtttaatttccttcctttactttttgctgtcttctttaggtaagctgaaccaactaaagagtggccttatgtgaatctacaaagtgaactttaacgtcagtcagttaatatactttaacacctaaatgttgtataacactgctctatatagcacttttaaatgtataaaatttttgatagaggataagtccatttcatttagggaaaacagttgtttcaaccacatgtattataataggagtaaaagtggcatatcgtaatgaaagaacacgggaagtcagaaaacctggatttatttttgcctctcctgtcgattcttcatttgatccggcctgaataatttccttttcctttaatttctatatctgctgaaggtgaataataatactttcattggccacatagaggtgctgggagaatgaaagataaattctcccaaagcactttgaactgcctagaagaaagacttatttaaacaaaagttgattctgttttctatctttttatttcttacaagcagacaccaaagtaagtgttagaagagcctcaaagatttggttattttttttttgcaacttttattgtaggtgagaaggttaatataattgccttcattgtataaacagggaaactaatgctcccaaaaggtttgttttggggcttaaaatgagtagccctttatgagaataggggaaattgatgggggtgtagatgtaataacatcagccatgagttgacaattattaaagctggtaatgggtgtgtctgtttaggggggttatcatgaatactatcatgtctaccttgtctttgaaattttgtattaaaaagttaaaatttaaaaaattgattaaaaaaatagctcattttcatttgcaaggttcttttaaaaatgctattgaggctggtcacggtggctcacgcctgtaatcccagcactttgggaggctgcggtgggcggatcatgaggtcaggagttcgagacaagcctgaccaacatggtgaaacccygtctctactaaaaatacaaaaattagccagccacgatggcgtgtgcctgtaatcccagctactcgggaggctgaggcagaagaatcacttgaacctgggaggtggaggttgcagtgagctgagatcgcaccactgtgctccagcctgggtgacagagcaaaactccatctcaaaaaaaaaaaaaaaagacaaagtatatgcttggaccctgaacacagacattttagtttttcatactcagtttttacattctatttccaatgctttctaaccatttactacttttaacatattatgccatttctttagcgttaatatattacacttttttcttactcccgttccagatgtttgtcatgtgctttgttgtcaattttagattttcattttcctatttttgggaattataagcagtcacttattaacccaattactttatgcttcaatgggcttgtcattgggtagccatgtgaattatttcaatttttagagacacagatcaacctgctaccctatacccacaacagaaaactgccgacttccccattgtaggaacttacaatcaaacggcatttgaaacatgtgagaacactcctattattaaaaaaaaaaatcaccctcaacctgggttattttcactgacagacttgcatggttaaagcttgctatttcatgagctcccagatgacgcaaatgctgggaaatgtaacatactcactgtgatttgtttttagacatcaaaagaaatccattttacaaaggaatcatataactttagagctaagaaagatcttaataatcatctggtatagatctttccatttatttatgccagaacctaaaattagaaaggccaggtaatttgctcagtgttacataccttagtatggcagagctggaacttgaacctgagttccctagctttcaattcagagttcttaataggttgccactcaagtgcagtcaggtctttgatgctatttgtgaacaccaaatatgtctctgcttcttacaacttagaaatcttactctgttttgcaatgccctgccaagtcatattggagcctgaggcaaaatgaaagaccartgacactgatcctgtctttatttaaaattctgatattttcttcactatggatttgtgggattaattttgattttttaaaatattgcattaaatattatatcttgactactgagttttttagtagctcctaaaattttgcatttgaagtgggtgccttgcttgattcaccctagtcccaatcctattatttttgctttaatctactaaatccctttttcagccttctggcaataaaataaaatcaacctatggaacctttataagcaaacccatactattggccacttacaaacaatggtggcaaacaaaccagaatctgcaagtgcttttcattggcttgattgttggtaacattgcatggtaattacatagtcatttttggctccatgaattgaaactctcttggaatgtctagcagtttattgaaaagagctcaaagccaagacgtgagttcttttgtttgatccttcacagtattgtgttttaggctcttatatcgttgtgtttgttttgatttctataaattgggactcaagggaaggaagctctttataggcctattattttcattttacttggtcctctcaacacctgtttgagataggcactttataggctaaaaccaactcacactgacttaagttaaaagagaattcactagctaacacaattgaaaaatctaaggagtagatctgacttcaggtattacacatcattttgtcagggctttctctctcgtgttttctactgggttggctttattattattcaggtttttcctgtgtagtagcaccaggtgtatactctactagcttagcaaccttagtagaaagggaatgaatctttcctgattgcttgagccagagtctcagaattgagtataattggcccagcataggtcacatgcacatccctgcactaggcattaaggcctggcgaatgcaattaaatcactggctgaacctggttcatgtgttcaaccctgggtcagggactggattgagagtagaagagatctgtttcctctaaaggaagagacgactttttaagtcttttccccccaaaagggattctggacagggaaagacaaatgtcaactaaaatgttactattctcacttcatttatgaggaagttgaggattaattaagtgaattttcacraggctgcatagctaatgagtgataggatcttaactttgacccaaatctgcctaaatctaaagcccatctcttttctccacaccttgtatccctagaacatcatgcttcttcctcyttctccttaatgtgaaaccatgatggttgccatcactttacagcagtattcttcaaaaaggagggattttgcccccagaggaaatttggtaatttctggagacatttttttattgtcacaactgtgcacagaggtgagtgtggtgctactgyatagaggctaggatgcctatacctcctgtagtgcacagaacaattcctcacaacaaagaattacccagcctaaaatgtcagtagtggtaaggttaagaaaccctgctttttaggttcaatttctcggctgttactattaacatcagttttgagagaaataagtaatagagagcaggattgaaataattcatacatgtaggtataattaagttgtctcttaattcagggaaacttcctttaatttccatagaagctaactttagaatattgaattatcttggttagtgagtaaattgcaatagaacgtaaattcctttttaaaatatttgttttatgcaagtttaagctaacttcccagacataatttttcattctaaaataagtcctataatttttttcttaaaatagaaatctagggatattttaaattgaatactgaatgcttttaaaggaaatatataagtttatctcaaaagccttttaatatttcatatagaagtttctataccaggggaaataattattttttaaaatccgagctgccgggcgtagtggctcacgccagtaatactagcactttgggaggtggaggcaggcgaatcatgaggtcaggagatcgagaccatcctagctaacacggtgaaaccccgtcttgactaaaaatacaaaaaattagccgggtgtggtggcgggcgcctgtagtcccagctactcgggaggctgaggcaggagaatggtgtgaacccaggaggcagaggttgcagtgagccaagattgtgccactgcactccagcctggatgacagagcgagaatccgtctcaaaaaacaaaacaaaacaaaacaaacaaacaaacaaaactgagccaaagcatttctaaaactttggatgataataagggatttaatgtactaaaaagcatacagaaattttcttcctgtaagcatgtgctttgtgaaagaataatgaaagcagaagaatgcgttaaatgtattatagctgcagttattgggtttgacacttcagagaaatcaaccttcttgttaaatgacatgaaaatagtttatactgtctgactccttgagacttgcaagtcgtttctgaattgtgcatatctgaatgaatccagggaaagctgtgcttctgtagtcaaaccacagataatattctagtagaagagctgaatgagtagagtgatactacagatggatttcatataagaaatcttttacaatccagcaagtcaaatttattgttggagtcggaagatttgaggcttagcattttctcgttttgccagttttatacaaataattcttcttgttttccaaattctcatgactgtatgcagcatggaattacaagtccattcctttctctggttctttttaaccttatcagacccaacccagatcaatgaacattcctctgatttcaactgaataattctgacttgctttgatatctcacatggatgactttcttcccatctctcctatcccccgatggtccttcagctcatgcctgtcgtgcccatttttttggcctcacttctttacctaatctcaggaatactcattgctttttctatttcttctatttttctttggcctctctttccgctcccatattaaatttcctccttggctataacgcctgccttcttctgtttcccaagtcctatttactggctctgtatccttagactcacttgtttcttaattcatatcctcatctactaaggtgcctaatggccacccacctagcatattttagtaaggcatgtgtgtacagacaggtcacctattcattgttaatagaattcaatttgcagtttccctggaaataaggcagtttctgatcttcaaatcacccaagttcttactcgttagaatgcargttcctttgtcacattaggaaggacagtaatatttatttatgaaaaagttgaaaaaatactgtaataaatggtgctgggttaattaatatattattaatatggtcctatttttcttgagaagaaatgttcttgaagatttgaaatttcttatctgtttacaaacattttcctggtgccatcagcagtttattcctctttactgctttgtgatagggcttggtattcccaattttacagagcagagatgacaggtcacttgactaaacaagtgacttatttagaatttcacaggaaagtaattacagagcccttaaatttcctgtctcttacttctatgatataaaacaatttactttgcattccttatttatataaatgccttagagcatttcctttcctttaataaaatcatgaagactatcacctggtaatgaaattgttaggatggaagagaaatgaactaggcacagtgtacgtgaatttgattattgccttttcaactgtctaataatgggagctgtgggctcataggctctccttttgaattgtgaaaactatacttattttatactacattggtgaagttccctgaagtccttaaaaaacaaacaagatttaaagtgcaaaatgttattgttaagttaaaatgacccttgtgtgtttgcaaasstccgcgggctttctggggctagtgatccccttggtgagcattgtggagtgtggtgggaaccagccatgttttggtgatttcttttagatttctaaaactgtttttctgttgggttgaagtgggaaaacagctttggaactgcttttggtgttgctctgagtgtgtttgggagtgcattccaatagtttgtgaggggatgttagctgttcaggaaaaataacccttaccaaaggtaatggttcccactagcattttcagtaacatgtaccagatgtgggtagttaattattctcagatctgataaatacctgccagccaagcctaattttattttcagtaaacagtggccaaaggtcctagctgttcatttgataggatgggcctgtttgcacttatctattaataaaagcacaacactcctttagttttcctttcccagggccagataaaacattttagacactcacgtatttgtcttagtaaatcagacaaagtaaacaaatctggtagattaacttggtaaatagagtgtggttaagtgttacctttggagttgaactcartgccatataaatagcattaatcgcatggtattttcaataatctttatggagtaaaacggagggttgtttttttctttcaaccaacagggacttaagtatatttcttaagtactttcagatgtycttctgtatggagattttaaaatcactttaaaatgaaatttattcttttgtcccattagtaacttgttgggaactttgtactagttaacattatgtttaaaaacctggaaacctctatagttcatctcagaagaaaaataggactacatagtggcatgcaagctttgccagacagagataatggccatctagaggttactgatttgggtggaacagtgaaaatggggccgcttttatggggaagacagtggctggtaggcagaaattcactttattcatatgcattttttttcctcttgggtaaagagttttattagggtcagaagtactatttatttttgtgaggtaaattcttgtcttgtgagaactggcatgaaacagactcattatttcacactagccaacaaaacagtattttatcaaagtaacttctagtcagtccaagactggactggatttgtactggtaacctggtggtgcagggctctaagtctcatgccagctcttgtctccctcattaaacttccttttttagtaatgattaaaaacaactctctttactacaatatattttctcattggctttatactcgaagttgcaagtactttataaaattatttttagttttgcatgctgtataataatccatctaatttggtaagcatagtacataaaagaaatagctgaaaggctttagagaaagttccctactcatacctccccctttacaatgatctcggcattaatatcttatgctgtaagagggtggcctggcacagtaccatgaatattgtgcccgatacccagtggtaacctaccaatgattgttatgaaaatgatggtgatgatagtataggggagagagtgtaaaccaaaagttgagatctgtrttctgttttcagcttcattttaatggcctactggaagaccaggtacattatttctgctctttttttttttttttttttagtttctccagctatacatgaagaaaaaagtcctagtccactagccaacctgacaggcatgttgtgaaaactaatgaaagtataaagttctcatagtccgaagcataaaaggtgctgtaaccaataggtacaaaatactaattattatttttacagttcagcatagtaaatctttggagtaaatttttttcattatatttactagtctttcctttaagaattatttgccaaatttaactctttttctcttttaattagacccagagtatagtaaaaaaattgatggtttggctttcagaaagagttattttgttatctgtaccaaattttcaattaaatatttttagctgtgaatcaagtttcatcttcaaaagtgtcttcaattttaaataatttgagaatacttacctggttagtaggctaaactaacgtagtagggaagagagtgtaagaaaagtgctgttgaattcatcattcccattagcaccagtctgcrgattcccaaacatrtatttctaggctcagatatttttcctgatccccagacttattaatccaggaactagtcaacttctttacctggatgccctgtaatgatttgtagcacaacatacataaaacttaatattctgttcctgaatttgctctctctgtgaatggaatatctatccaccccatctctcaagctgaaaaaccctcaccccatttcctcaacatctgtagatttaactgtcttaatactttatgccccttatctccatcccacaattactaccttaattcggcttttgctcttctgtcaccgggcagctgcaattgtcttcctgccaccagtctggtctcattacagtctactctcgataccatttccagattaacctttacaaaatgcaaatcatagaatattactgtctcattttaaaaatatttagtggtttcttgtgtgctataagacaaagtttacactctttatattggttattgaaatcttaataatctttaccttgtttctagtcttgaatcctcttatgacctctgttctagtcacactgaaagtttgtgggttccaaaacatgccatgttgttggacattctacattctctccacccacttctttaattgccaacactgttttatattttaaaacctaattccagtgtgaagtcttttgtaactccctccttgtatcccatcataccctgtatatacttcttacatagttcctataaaacctatagcacgtattttgtgtatatccttcccttcctgctttattgtatgagagattatgtcttgtttatttttgcctttcaacgtccagctcagtggttggtacagaggtagcacttggtagattgattagatagtgggtggagtaaaattctatgaccatattttcctcctcaagttctactcccttttcagtgttgcatggaaatggctttttaaagtactcagattaagatttgatgggtagacgaggtctttacttaattggtatgattgatgggacaacaggaatactcctgtaaccactatacctacccaaagatttcatagacagtctgacatttccccatgaaaagtcatttattagagttctgatattctacttattatactccctgccctctttagcactttataggtacaaagtcctcccataaacattatcttatttaatttttaaaacaagcttatgagatggattttattgtatatactttaactttatctctaaagcatatacaatataatttgcacccttaggcagatctgtgaattgctttgaagaataactcgctattctttttcgtgatttggactactctgatagtgacactgttttgctaagctgtgagagtttggaagtgtctcccataattttgacactagattttattgggtacagcacaaatatcactccttggggtgggccacatagtcacggacccacagatactcagataggaagaggctctaaaggacattktctctttatatatggaattgtatgaaatttaatagaaatggatctctagaattttactccttttaatcaggacagtagtacaaagcaaaacttttgtacactgcctagcatggtgctcagttctgcaaacgtcttttatgtctttgatagtgatggtggtgatgatttagaagcagtttttgcccatatacatataccatggtaaagcagttttctcgtttaccaacgatctatgaggagcattatttttatagatcttagatataaattctctccttcagactgtttgcctgaaccttaaaatgtagcatgattacacaagcactctggaatttagattaaacagcattcaatttgaaaatctaatcatatcatctaaatatcattaagtaataataggctgattgatagggaccaaagctgttttggcctggtgttgcatgcctttcactcagccagccttttcaaaccaagatgttgataaagaggtctataaatcttaatagttggagacagtttaaaagcatagttcactggataaggtcacacccacttaagtgacctattttgtatacttttcaaaaataggttaattaacttaatagaaataagactctcatattgatgtgcaattactactaaaacagctttgtttttttttctttccaagtgaacatgatgttcatgaaattgagggcataatagccatgacaagaaccaggcttagcaaggcaggtcatgttcagcgagtacatttcagacttcccctttaaaatcctcttttattccaggtcctaggacataagcatacacctccatcagagcagtttattcctggctctctcctatttcagtttttaggagggattattctagctgttgttgttttcctaatcactataacagcactttatatagtttctgatccctgaagactccagcttgcatagtaagctcaatgaattttggtctctttttcttttaatctgaggctttcttcatttttctaacagatggatgattcatttgctaccctgggagaagcatggtttcagaggaggatacagtataaaagggcaagggagtacccagaccagagtcatattctggttatattctcctcatacagcctgctttcatttgttgttgtcgtttagtgcccatttcaaattttctgctcctaaagccttttatctactcttagtcttcttattgatgattataaccttcttagtctattattggtcactaattttgcataatttgattttcccattcatctgttccttaacatataaccccttaatgttttatatcgtaagttgagtacatgggcatttattattctttgaacttttaaatatattttaaataacatatacatttagaaaagttaacctcctcccccagtctgatatcttgtatcacacataactctctgtgtagatgttgctgagtcctgctggctcgaattttcctgtggccagatggtctgagaggcagttagtgatgcacattcatggaagggtgggttcttgcaaggtagccatgatgggtatatttgaattgatggatatatgttgatctgatgggcgtattttgaattagaggttctaatatatatagcagaggttctagatgacctctttgttcaccttacagtagtgtcatttctctgcttgtttgcactgcacttacarcaaagacttttctaaattaaacaagtcttgtttatatgttttgtgtatgtgatcacaaaaaatagcaaagaatactgttctatggactcttagctgtggtggaaagaaccattkaaactctctcagcctttagttcttcattaggaagatgcctttcttactgagggttgtaatgattgtgaagtccagttttctgacttctccattagggaataagagaactctttggttttaaattgaaagatggagtgattcactctccagtgtaggagggaacctactctacttgaatttgctatatttctttatttcctaggaaaatgttggtggttttccctcccaagcattctctctagagtttagcagcatcctttccttgaaagcaaaggcctcatttcctatttctttcatatcctttaatttgcctagtacagggtccatttcatagtaagcactcattaaaaacattttagttaattaactacaaaatgtctggctcaggtttaggagagaatgaaagattgggcaggggaagtactggcacacaggagaattaaaatcagaggatatcctttttattactaattctttttccaataataaaagtactctattttccttatttaagaaagctatcatttaaaaaattagtgttctaaaaccacaccctgaaatgactactgttaacattttgtcatatttcttactagtcttattttatacacatttaaaatttttacatagtttagcttatattttatggtttttatatagtattttttacttattttatcatctcatcctattaaaaacttttttgtcaaaggaattttaatggcagcagaattgtttatttcacaactgtaayatgaattctataaccattctagatgttggacatttaggctgaatctattttttcatgattataattagcaagttgccttttggaaaggctatacaactttttattctcatttctgaacataaaatgttgatgaaaaaaatgtattgggaatgataacttcactgagttttagaccagggtttccagaagtaaaatgttcmtgtcttggttttggcctttgggtagaaaaaagtaagtttttaccaggagtccctgaaagggaargccctgctggccaggggtttcaggctcctcctccataacccatcaagtgrccaaagtcttgattttctgtgtaaacgggtagacaggttctcagcctgatcgagtcatgtatttatagaagaggttctctttttcttgaagaatttctgacttacttgatctgtcatcattgtctcwtatttgtaactttagagcctgacagaacaaaaaagaaataagccatttctgtagcagaatcttatttggagaaaaggattcaagactacagcgtcctatttttttttgtttgtttgtttttgttttgagatggagtttcactcctgttgcccagtctggagtgcaatggcagcaatctcagctcactgcaacctctgcctcccgggttcaagtgattctcctgcctcagcctcccaagtagctgggattacaggcgcccaccaccacacccagctaattttttgtatttttagtagagacagtgtttcaccatgttggcccggctcgtctcaaactcctgacctcaggtgatccacccacctcggcctcccaaagtgctgggattacaggcataagaaccgcacccagcctacagtgtcttttactaggaattgtaattttattagtttctaaagaaaatattaaatgcagtgttttgtaggcagtgattacctttcatcttgtttgtcatatttctcattctttttttgtgtgtgtgacggagtctcgctctgtcgcccaggctggagtgcaatggggcgatctcggttcactttaacctctgcctccggggttcaagagattctcctgcctcagcctcccaagtaactgggattgcagatgcccaccaccaagccctgctaatttttgtatttttagtagatacaaggtttcaccatgttggccagcctggtttcgaactcctgacctcaagtgatccacccacctcagcctcccaragtgctgggattacaggtgtgagccaccacacccagccatatttctcattcttattttaggctgatgaaaatactaaatatttcaacacctctgtatcatagccatgtttaaatgtgcatatccaccagtcaattttaatacattcctttctagtaaattctgttaggtcttcagttcaactgtacctccctcagtgtcactttttaccttccctcctcccttaaatcgcctagttctcattttgaaaaggtagagaaatcctttgtcagtagttaggaggwtgtagatcctgtatgattttctgtcattacattcttaatctattacatgtgtatttgtcccgtccttactgacttaacctctgaccacattgcaaaatgtaaacagagccagataccgacaggtttgtcccttcattagccagggcccaattcataatttctattttctaatttggagaataagaaggttagctagattaagaggctttcctaagtcacataaccgtttgcaagtagctaagaacaggattgtgaactcttgccaaactcctccataaaattccataagcttgtgggagctcatttatacaatatttaagaggttatataggcaaggagaataattgaatttctatatatttagattgactgatatttcccaaacttcaagtggaaaaaaaaagcccttaaagaaagagcttaagagaattaaaatgatgtgacccgaaccatggttcctttctcattcaattattttcttttaaccactgatggctttttgtgcttggctgggtaactttctagctagtcaagcctatgttatgaaagagaaataagacacttaatcctgtgaatgattaactagtattggcctcccttcccagtagtttgcccttcctgtattgtagtctgtgtactcatttctgagccaaatctccaaggtctcttattattgagtgtagggacacctggattacagggagttaggcctttgttttagtctgaagatgatgtggctaattatacagctccaggcatttgcattttttcaaggcattttaaagtttattgcttgtgaaaacctagtttgtaaagtatcatttttaaattttacaggtgaagaagtagaactcagagaagttttacttgccaaaagttctgcagcaagtcagtggcaaattcaaataagtgtacactcatgtatacttagctcagtgtttaactcatggaggtattgttttgtttcttatttataatataaagccaagtagggctggctagagccatttgtagttaatacattttggtctttgatctttttccacataaggtcagacttcaagatagaaaaatattctttatattctttgcaaagagctgattgccatctttctatactgcctgtgggaacactctggccttagaatccaagattttattatccaagacagcagccagtaagtacagtgagacctaagtggggaattaacttttgggctgtagattttgaatgagaagtcctactcaggatctgagaggtgacaagaacgagtgactattcattgatttggattcctgggtcttggcaccttctgtgggataagaatcacatgcaatatgagtaattttgtggaaaggtcttggtcctggttcatagactgtctcagttcctcagtagagagaacttagaggagaaatgactcccttgttgtcatattgaagcagcagcagactattagggagtacccatgttcctggcttctttccttgggctggaaccattcaactgcacagataaatgtttactcaaggaagaatgcatagctttgaaacagtcttaagatgagtaaaagtcttaagatcagtaaaatatacaaactactcctatgtaggtcattatattaacatctgtggccacatattggtccatgaaagggatacttctagccactgaaatcttaaccactagaaacttactctgcagggcatctttgtaattatggcactgagtagcccaagtcttagattatttcattgtgatgtttccagtgtaccatcaactgtataggtgattagcatttgcctattaattccttcttcctctcttatcttcttaatgactcttatacattttgttatcttttcttactctccatgtagtagttcttactctgcatgttcagactctagtggaggtgctaggaagttccactttctggtagattatttagagtacaggatagtcaagggaataaggatggtgctaaggcaggctgtggtggtttaagcctatagtgccagctactcaggtgggaggatccctggagcccaggagttccagggtgtagtggagctatgattgtatcactgcactctagcttgggcaaaaaaagtgagaccctgtctccaaaaaaaaaaagaaaaaaaaagtggttataagaaccataggaaagagaacaacatcattttgactaagacaaaggcataaccttgacagatctcagtgtctccaggctaagagaagagcaacttagatatagtaccttgagcctttcaatgattgctgtttaaaaagtatatgactgtaggataggatacattggaaatactgaacaatgctggaggaaagccaacagcatgtggataagaccatccaatggggccaagatgagggggcactggattggatcaacgttaatgactaaaattctctgcttctaatatacacatgactaactcccttactcacttcaagcctttgctgaaatgttatcttctcaacgggtctgcaaacctattctgacctacctatttaaacttggaattaattgaatgaattaatggaagcctcatgttgattaatcctcttttcaaggactgaactgcattacataagaaaatttaattctattaatggtgagctcagtggcacaatccacatctaagtttttagctttatcctccttgcaaataatgatattaagttagtgtaaatattaataatatttgcccatgagaaaggaacagaatgttctctacctttctccagccatactttgaatcctggggaatcagcatttcccagaaagatcaaactatcratgacataaagcaacagattgattccattgatgatctttttataatactgacgtaccacattcttccccatggcttttgcatttctatctttccatctgagacttacaacttcaaactccattttccatgcttttgctggcatgaagaaggaaaaaagaaatcatggtgcatttactggccttaaagaaagttggtatgtttataaaagaaataaagcatactgaagaggaacagtatttgagtttcatcagttaagcagagcaatttaagtactgaatgcttcatactgaccatttccattttattcattgtaggcaggtttataaagatggctaggtgcacttgtccatggttctcccacccgtgtttgggatgtgctacctcacaagcatagctggctggggatagtctttaggtggaaaatagctacgaaatacctatttttggttgtattaaatgagctatggctgacatattctgtgattcatttctttctaaatgagtgctggggcatgatactaagtgtgcccatgtctcactggtcttgggttcttttatggttccccagccaaattcaagttgaattatggtgtccgtttaacttacaggtgtctgagataagttgtcagttaacatttatacatgagatcaccatctcctagtaagtacagagtactggtagaaaatgtgtggctcagtctgacttgggttcaaatcactctaccgccttttattacatgaattccatcaagtgaacctctctcagcctccatttcctcatcagtaaagtctgacagttccaagccaatggcttaatgatttctctactatatatgcacttcctagaatagttgcattcaaatttgcaatatctttcatcaagatgttgcctctctttccttctttttctcttccatcacagtaagtgatagaaacctgcttgctgcactcataaataaatggccagacrtgtgctataataggcaggatcctcctgctgagcctggactccatttggatgctgtgttcgttagttggagtctcagagtatgtgccaactcaccaatctagctaatccttaaatatccctaggagatgatgaggaggcagattttatctcttaggcatgcatcttggaaaacataccaagtaacacgtatctatttttctggggctttgtatggatgggtggcaagtgaggcacagagaggttaagaaacttatccaagattcacaatagtaaatagtagaactgggattcaaacccaggtccaactaattccaaaacctgtactcttaatcagtatgctgttctcaaagacttagctcttaaatccttagtcatttctcaaaataagataatacattctagtgctgaaatagtggatcagaaaatttagagtttactctcagctttaccagcgacttcacctcaggcaactcaatcatcattagatgatttctctatgaggaaatgaggatcatgatgtctgtcactcagggatagaatgagcattaaaaactaaaacaatagcctctgtaaaagccctttggtctccagagttgatgaacattgcattaatctacagcattaatattttatattgaagacttctgagcaggtcattttgaacacaaaaaarggtaaactttggatcatgtattccctggttctagaaattaaaggtaaccaaccttgaaataaatagttatagcagtgccaaaagaggatacgattatggaacaatatcacccaggtatcttacacagaaggcttctggattgtttcagttagcagcaagagtatgtatttcatgggcctggggcatattaatcaactgcactatgccaagatggagttctgttttttactagagatctgctctaaatcactctgttcataatattgtcatcaaatttgccatccacaattgaggcatgtcacaaaatgagcaaaggagtccttttctctagagtgtaactgccagaatgggccaagaaaggtaatrttggactaagacttgtttctgagaaaagtttttcttccagattcaagactgacactgagtgtacaatgccacattgacttccaatggcaaacagcacataattctgtacacaaacacttagtgatgttttcctctaaaacttttaaaagcaccatctttttctgggtgccagaaaggcactcagcccaacagtataagcctatgactgctcaagcacatgtgtgtgcatgcacttgggtgtgcatgcrtgtgtgtatgtttacacaggtaggcacctaggtgttttgttctccatttttagaatgatctttgttgctggccagtaccagagtgatctaattatacatgctttactgatttccatctaccaaaattcatgtttcaagtttaactagatatccttagtggatgtttccttaaaaacatgcgatcacatgtgcttatcttttctctcactaggctggagcttaagtccacttatgaggagaaaatatataaaagcaactctaaattggtgagggcgatggagggggccagtggggaatgagagaaagggaaaaatgaaaataagaagcaattaagttttttttttttaaattagcctaagctcctggaaacagatataaataaatttgagaaagccttccaaaagtcagaagaatttaactctccagccgagatgttcaagctttctggcatttgactaacgttttatgctctcttgtctattgatcattgagccactgttgagatgaccagatgaccaggtgctaagcatactttaaagaaagttaccttgcctgaagacattttcctactcagatatctttaacagctcaatgcacatgaccttggcattgcttcaaaggtggcagctcatccaagtaggcagaatacctggtctctcagcactgcttttataatgccctttttctmacgttgagctggtgaccatgctgccctcttcattttgcagtaatcagggttgtcttcttttttcatatccctttcctgcctgaggctgcttcaacaaacagcaagtataaactgaaaccctatctctttgcggatcaaacacacagcttgaatacattgataartaactttaaaaaaaaattgtttagcctgtggacctatttatcagaatgctatataaaattattgttttccagtgacccaattagttgaaatattctttctgaagctataggaaaaagacttaatattgtttgatatgattttatcatttgtttagttatgtatcacttcccactttacagtgtgttatgcatactttctttttttctgtcatccttcccccatgtctctactcttcagtctcatgcataaagaaacagggttccctacttgacagtaaccacatgaggagttgacattggcaactggtttaagacttcgatcataagtcatctaagtaattgggctatgcgtatcctgttgaatcacattccttctcaaatccttctttgttaaaagtttgaagcccaggcctttcaattttctcttatccctttaagtccacaaaggaatttttaggctgtttctggagggttataacttctccccagtgctgtccaatagctggcatattggaaattggcagaatgtgggtgcaagagagaagggagttctcagtaaagcaccattagaattctcccacagtttgacacattcatttcattgcccctgttttgtgtggctagcaactgatgttgtttggctgtgacatgcgtaaacagatgttgtaaaaaacctgaaaaacaaaaaatcatctttccctactttttcaggcatactgaagacagaatccttttttggttatcttgaagagtctgaaataggaaacactttgaagtgtagataaaatttctgctctggtcacaatggatgccaagtgttataaaatgattgtgggagtgtgtttctatattggcattttgatatagaggcaggtaaragcaatgccaccttcctgcagagtactctaaaaccctttcttccttcattaatagttttcctttgaagataaaggaactgctttcattatgtgtgaagcattccttttacagttaaattactgtttattggtgagtggtttccttgctgcgctagtatgcggcagatgtttctcatgtatccctaggttttcaggctttttcttttcaggatgaggctctgttgtcttttctttttttctttcttggcaagaatctgattgggataaaacacattttatgcagcaaattaaaaatacgtatttaaatttaccttttattttttacctaaaaagttcgcaaactacttgtagctattattactctgaggtcattcctctgatacaaatgtatttgttgttttatttcggagctacagatagaaaatctaaatacagaatattaaaagtatgtagtgtaacatgacttgtacttagtaggtactccgtaaatgtttggaacttatgaattgaaggtttctttctgatcttagtctagaacagtgcttcacagcctttcttatgtcataatacacatagaaattgataatatttatatgtcatatggaatttttttcaaagaacatctctagtaataacataatacagagagggatacaagttgaaaaatgctcttctatgttgttattgtaacttttaggagtaagactaccatagaaagcatgcattagaatgctaggctatgacatgggtaaacagatgttacatctttcagggcatcacaccataggagtggtatgccttacatcacatgggagatgtgaatggcttataaggagtcccaaacactaggacaccagccagttgaggtctgacttcaagacagttgggtcttgcacagatggtagaaacagatggtagaatgtatatttgtgtatggggggagagggtgccctgtattccaccctttattccccccttgcattctgagactagagcttggcctatggcaccgacaattcctcagtcctgaataacatgtataggctacagcattgcctagttccataagtcaccctaatggttaaagttttgccacctgtcaccttaaaataccccaactttgaatggattctgaaccatagcctacgtgtttagaatgtctagtttgatggagcacagatggtttggggagcgctaacattcatctttactttgccttcatctattattttgcccaaacgtgtttatcctacagcctgcttactaatggctcagtttgttctagctagttgtggtttgggagtaggaggccactctgcccactgttagatgaggggattgtaaatgttagagagggccggggtagaggagtactctttttaagaaaagtagttgactttgataatgaaaargtatcatcatgattatcgtcatgctgttgagtgctttactacatttcasgcacgataaggttatatatttaatacttacaactttatgagcagctgtcgtcattatcgccactttacaaatatggaaacccaggcaaaaagaggytaagtaactttgccaaggtctcacaggtagcaaattgcagagccagaatgcaaaactactgccttatgatctgcttctctaagtagctgggaatggagaaagacggcgagcagatgtatagaatgcactgattagggtgactgggtgagctctgtgctgagttatacttcaagatgtacaggacagagttagggaaatgtgagaccaagggcttttctgggcaggaacaaccatactggctgctgtggcaaggttagagcctgccaggtaactacagtgagacttccttttcatacakattgggggaactggcaagacaagttatcatcacctccacatagcaggtgagggaagggaagcaacagcagaggcattggtgttttgtatttagaagggcacatagcctaatgctaaaactcacccattagttacatcaatgtttggatgctctttgaaagacttctcaggagaggtgtgagaatgatttgatttgaaggtgggttttagtcttgaccgtgtgccacagcaaacaaaatgaaactccccttgagataaaggtaatcaagatgaaggtgtatttacaaagatgagcagtgggatttatccagtgactctggaaggtaatccccagatttagtgctccatgaataccttgccatgttcctaagctggtaaattactctgagttttatgagagcggattgtgggaagcatctagatgaaattcagcctgtttcacctcgagtccagggctcactaatgcaccccaggtgtgcagactgcccaggctttctgccttggaagcctcaaggaactttcatcccaaagggaagctttgaagaataccaaggacctttctatctgtccttgattttttgtcatttttctgcccacatttggtaattggagatatttgtggtgttaaagccggacttgttccttctcagcctgccccctccagtagtgaaattttaagcctgtggctttgattatgcaaagcagtgatttctctgcagtgtccctcagatgtaaaaggagaatgactgaaatactagaaaggaagttacgggaaatcaccaaacaaccattttccatgtctacagatcctttcatctgagggcaaaagaagctggagagggtgcctccaaaggtgggggtttggaggagcacaatttaaaattctctgggttgtaggctaaggatcaaagggttatgtcctcagaattacacggtgagtcactggaaaaactctgagtaaaagtcaggcatcctgttttccaatcttatatgcctaataatttcaactggctttaagacagtacatttatgtatatttttcatttagatccattgccacctaaagaatataatgatgtatgcattatatagattatggtttccatgccctagagcatcatgaggtgttttgccatgagaatacagtgggttaggtgaagaggtgcttgagaagccttggtgtctaatgtgtggtctcagtactctgtggaatctcctcctcccttacaaaccactgcctctattcaagccatcttgtgcttcaatttagaagttctcctttaagagagagttttccaaagctaaattaacagctatgcagtgtactgagtaactctgtgatttactttttccaattttgactgctgtaagcatttcagtttgtttcccactagtttggatcaacatgttggttttaactttatctccaaatgtaatgattttacatattatagacaaatgtgtttgcacagttaagggcagcaggatttgcttgaacagagaatatgtgagttctgtaacttttaatattcaattcaatttaaattctttttcatatgtcctttttatatattccagtttctgattatgggtaacctgacttgaaggtcagaccatctgaagtgaagatggttaaattgtatgtgtttgcacatgcatacacgtgtgtgtgtgtgtgcatgcatccacatacacatgggtgttcatgtggtaaaggagagccagagagatgtttaatttcctcaccacattgtagaaactgaaagagacatgtactgcagaaacaaattctgagatacgtttgctaaccacttttttaggtttcaccttccggggaaaatgttaaggcatttgcaaacatgcctagtttcttagcgatttaaggcgcatagactctctgtgactacacctagagaggtaagacatggaaaagaacataagctttgagccacctagattaggggcttaatctggccacaccactttttagatgtataacttcaggttgattactggacctgtattccttttctttccttggttgacacttgttccaacttatgatgttggtttatgattttgattttagtttggttaacttcttatttgggggattttgactgacttaatttgttctcatcttgtrttagggttctctagaggggtagaactaacaggatagatgaatatatgaagggaaatttattaagtagtattgactcacacgatcacaaggtgaggtcccacaataggctctctgcaagctgaggagcaaggaagccagtccaagtcccaagacctcaaaagtagggaaaccaacagtgcagctttcagtctgtgtccaaaggcccaagagcccctggcaaatcactggtgtaagtcaggagtctaaaagctaaggaatttggagtctgatgttcaagcgcaggaagcatccagcacaggagaaagatgaaggcctatagactcagcaagtcaagtccaacttctgcctgcttctttctagccacactggcagctgattagatggtgcccaccaagattgagggtgggtctgcttctccaagtccactgactcaaatgtttaactttttggcaacaccctcacagacacacccaggaataatactttgcatccttcagtccaatcaggttgacactcagtattataaccgtcacacatctgttatcctattgatcctgattcttgacctctagccgcagttccattcagagaagattagaattgtttcagagttgggctaggcacgatggttcacacctgtaatcccagcacgttgaaagcccaaggtgggaggattgcttgagctcaggagtttgagaccagcctgcgcaatatagtgagaccccatcgctacaaaaaattttttaaattacctgggtaaggccgggcgtagtggctcaagcctgtaatcccagcactttgggaggccgaggcaagctgatcacgaggtcaggagattgagaccatcctggctaacatggtgaaaccccgtctctattaaaatacaaaaaattaggcgggcgtggtggcgggcacctgtagtcccagctactcgggggggtgaggcaggagaatggcatgaacctgggagacagagcttgcagtgagcggagatcacgccactgcactccagcctgggcgacagagggagactccatctcaaaaaaaaaaaaaaaaaattacccgggtatggtggcatgcacctgtacttggatgtcccagtggcatgctcccagctacttgggaggctgatgtgggaggatcacttgaacccaagagtgcaaggttatagtgagattttttaaaaaaagttattttttgagacaggatctcactgtctcatccaggctggagtgcagtggtgcaatcacagctcactacaacctctgcctcctgggctcaagcaatccttccatctcagcctcctgagtagctgggactacaggtgcataccaccatgcctggctaatattttgtattcttttttcttttgtagagacagggtttcgccatgttacccaggctggtcttaaactcctaaactcaaacaatccacctgcctcatcttcccaaagtgctgggattacaggcgtgagccactgtgccttactgcttagagtgagtttgctactgcaccactccagccagccagggtgatagagcaaggccctgtctaaaaaaaaaaaaaaamcaaaaaaaaaaaaacaggaagaagaagaaggagaacaattgtttcagagttaaaaagaatcttaaaaatcattgtgcttgacaacaatttttatgctgcaggtgcttctctccaaagaccattggtaagtttacctgtaaatggaaacaaaatatgaacaatccccaaatctgtgtttctgaagatttattctttctaatgcttgagcattttgaaagagagacagattaataagaaggaagaggcttcctagtatgagggaaagtgttcatgagttttagtcctagctttgactctcattacacatgtgaaaattttctcatctttaaacaggcttaaatacaaagaataactgaaaaatattggaaacctaagtggttataatgttgtatctagyagtgggactaggagtgattctttgtttggtttggttctgtttttatttccaaattttatgcactgggagtgtactccttttgtatttactacttcacccccaccagccaaaatgtcttaaaatgtaaaatcatgaaaaataaaaggatagggatgattttcagccccactacctcatagggtttctatgaaaatcagatgaaacaatgtaagactgcgcattgaaaaataaataataactacataataaagtattgccaacatgttagatttagccttaaagaaattcagtttctgtatagggcaagtggagtggcatgcaaattcttgaatctcttgaattcatcatttcagtttgctattcctgcaagaggaaggaattccatagatccaaaatgcatatctatttgtcgcaaagacaataactaaagattatttgctgctactacagactgatagcaaatttatcagcattaaaataattattttaaaggctacaggaaaaacatgatcatggcaaggaattatatcatgttcttgagtagattagggagaaagaatagaattcaggcagacgaggcttgcctatggtccccaacctttttttgacaccagggaccagttttgtggaagacaatttttccgtggatgggggcgggggtggtggtttcaggatgaaactgttccacttcagatcatcaggcattaaattctcataaagagcacacaacctagatccctcaaatgtgcagttcacaataggattcgtgttcctaagagaatctaactctgccactgatctgacaggaggtgaagttcacctcctgttgtgtggcccagttcctaacaggccacagaccagtgttggtccatggcctgggggtacccctgcacaaatctaaaaactctccctttgaggcatcacattacccaactggaaactatagtataaggctgcagtaagcaaaacagcatggtactggtacagaagcaaacacattaaccagtggaacagaatagagaaccctgaaataaagccacacacctacagatgtctaatcttcaacaaagctgacaaaaataagcaatggggaaaggactcactggtcaataaatactgctggggttgttggctagccatatgcagaagaatgaaaccagacccctacctttcaccatatgcaaaaattgactcaagatggattaaagatttaaatgtaagaccttgaaatataagaatcctagaagaaaacctaggaaataccattttgtacatgggctttggtaaagaatttatgactaagtcctcaaagcaattggaacaaaaacaaaaattgacagatgggacctaattaaactaaaaagcttctgcacagcaaaagaaactatcaacagagtaaacagacaacctacagatagggagaaaatattcacaaactatgcatctgacaaaggtgtaatatccaaattctgttaggaacttattgaacagttgaacagcaaaacccaaataacactattaaaagatgggcaaaagacatgagaagacacttctcaaaagaagacatacaagcaaccaacaaacatatgaaaaaatacttattatcactaatcatcagagaaatgcaaatcaaaaccacaatgagataccatcttacaccagtcagaatggctgctattaaaaagccaaaaaacaacatgttggcaagactgcagagaaaaggaatgcatgtacactgttggtgggaatgtaaattatttcagccactgtggaaagcagtttggagatttctcaaagaacctaaaacagaattatcatttgacccagcaattccattactgggtatatatccaatagaaaacaaatttttctacgaaaaagacacatacatatactcacatgttcatcgcagcactattcacgatagcaaagacatggaatcagcctaggtgcccatctgataaagaaaatatggtacatatagaccatggaatactatgcagccataaaaagaatgaagtcatgtcctttgcagcaacatggatgcagctggaggccattatcctaagtgaattaaggcaggaacacgaaaccaaataccgcacattctcacttataagtggaagctaaacattaagtactcaagaacataaagatggcaacagtcaacactgggaactactagagaagggagggaggaattggggagaagggttgaaaaactaactgttgagtgctgttctcagtacctaaataaggggatcattcataccgcaaacctcagcatcacactatatatccaggtaacaaacttgcacatgtatcccctgaatctaaaataaaagttgaaaaagaaaaaaaaaagaactatccctttgggatgttatgctgaccacatagaaatgtgggaaacctgcttgttagtggtgacacccacatggaagtgcttattttacttatccaacttcccacaacctttgtgattatgggccaccatcaagagatctcatttaaattacatttatccttcatatgcttttatgtttgtaaaagtaatacatacccttaaaattcagacctttcagagatacactatggaggaagggaaaaagttccccataatcttagacttaactgatattagcatgtttgtatacagtccttcaaattttttcaatgcgtatattaacatatttagtattcatttgcttcacaaagaatgtgtttatatattatatactgttttgcatctttttctcttaatacattttggacatatttttattttatttgtttatttttctttgttttttgaggtgaagtcttgctctgtcacccaggctggagtgcagtggcgcaatctcggctcactgcaacctccacctcctgggtcaaagctattctcctgcctcagcctcctgagtagttggtattacaggtgcacgccacgatggccagctaatttttgtatttttagtagagatggggtttcaccatgttaaccaagctggtcttgaactcctgacctcaagtcatccacccgcctcagcctcccaaagtgctgggattacaggcctgagccaccactcccggcctggacatattttataaaaccctttgtaataccagttgtcttaatttttcatattctttcagagtcatttagtccgtgatttcagtggtacatgtcttacaaagttaaaaaggagagctggatagtgatttctttttttttttctttgttgttcttcttttttctttttccttcttcccttcttcctttttttcttcctcctcctccctccattacctcctcccttctgtccctcctcccccctcctcctttctccccttctctccttgtttttccctcctcccccttccctttctcccatctttcttctttctcctcttctttcttcttcttttaggtaagaaagagttttttggaatgatctttcagaagcagttgctataggcaacaatattaggtttgtctatggctctacttttgtattagccaatccattacttgtgattgttgtgttgataatgggaatcgtgaattgattacttcatcaaagcaattttttccacactgacattctttctagcaatgaacttgtgaaatcaaatggaatttagaggtgatgctcctctgttttggaaaggtggaatgagttatccacctagaaacaaatctgatctagtcactctcctatttagagacttcttttgacttcttctctaaagaatagaatccaaatttattctcttagtttgtaagattttcttgggtcacctctctagccatgtatgtgcttcagacacactgatttcttgctgttcctcatccttgtgttttgcatcgacttttcttccactaggatgctttttgccagcttctctgcttggtgaaactcgtatgtttatagctctttgataaggctttgctcctccccctaggcacaactcctcctccttgttctctacttctattgtagtggttctgctgctatagtttaacttaccttaccagtcctaatctttcttttaattttttattgtgtaatttattgctgcatatgtattatattttacaataattaatattatatatttgttactatataatttacatatcgtaaagtacacaaatcataagtatacagttgatgtatttgccaggtctgaatttgtacctgggctgtgagccttcagagggtaggaacaatattttagtcattcttatatcaccagaggtactcaataagtacttgaatatgagcgaccactacataatttcctcagttcatctagtgtctatttctttatggaaaggggacattaacaagtatttttttgtagatgtttcaaaccaagtaatatttgtttactgtcttgctactaatctcaaaagttgagagattcaacctaaaatattgatttcctagtggcaattatagatcagtgactaaaaacaaatttcatccatttttctactcacttgataatgttttattagaaactataaatcttaagacttgaggtattaaacagcagagagatatggttaggatcaaacttccttttcctcactatttattccttatagaaaaaaagcaactaccccttcccttaaatttattattattattattatttgtgatggagtttcactctgtcacccaggctggaatgttgtggcatgatctcggctcactacaacctctgcctcagggttcaagcaattctcctgtctcagcctcctgagtaactgggattacaggcacccaccaccatgcccgactaatttttgtatttttagtagagattagatttcacgatgttgatcaggctggccttgaactcctggcctcagatgatccacctgccttagcctcccaaartgctgggattacaggcatgagccactgcacctggcctcccttaaatttaaattcccttaaatattccttttgaaagatgctttttaccattgctaaagaagtggaatgatttcaaattaatttcaaaataatttcaaattaatttcaaaattctcccactaaaagttgctgacatattaaaggaaatgatatttatgcatgttttctaaaagctagatgtagaaaacttgctcggagtaatttgattcaacaaaagagtttagtagttttccttgaaagataatcctgaaatcaatacctttaatttacattaggcactcaaagaaaataaacacatttccctacttaaaaggctggtccaggtactttttttgtgctagaaaatcaaggctgaaatatctttactttgtattgattcagattttaaattgttctttgaaaagtatatatggaaacagatttttaaaaatgtataaatagataaacatgtataagcagagttttaaatgtatagaaaaacagattyaaaaaacatgtccaccaaatggacatcttttcctactatattcagtaacctaaatgaccctatcccttctcagcttatcttaattttagtatacagttgcccttcttccattaattaatcaataagctcattcattcacataatcagtcattgttgatgcctgttatatccaaggcactctatattctatatgctttatattctatgtactctatattctggagacatcaagawgaaaagttcagattaaaattttcctgactccatttttaaaaagttagtttttacttttatggttaattgtcttaatttaacaagtgtccatttaggatgtaatctgtgctcagtactgttgtacatcatgatctatattctctctagaagctagcattttatcccattgatttaaataatgtctaatgaattttaagttcttcatgtggttagtgttttacattttatgagtaataatgaaatggaagattcaagcaaactccattttcctgagaaatatgcatctctttatttcccaatgttaattatctaaatgctgttagttaatgctatattactacaagctttttttaaaaaaagagacaatatcctttcttaaaagaatgttataaatataaaaaagtacttgtgttaaataaatgttattgttcatttttagagaaatcgagtgttttcttggcagagatgggagaagaaatgtaattgcttaaataattaagtattcatgcttggaaacccaacttctgttgcagggttaacatatgaactggtgattaactgacaaaaattaagcatatgtgtttggrtcatggtttctgtggaggccatagatttgctttatggaaacttgagcttctgtataacagagtttgaaaccattacatgatcaggtcatttagtaggacaacccaataaaaggtaacttgaggccccatgataagaaagtgtctaagaactaagtgatatggttacttaccaattaaaatgagaaaagtcatactcttttagttttcatctgttatggtcatggggaaaatatttctttgaattcggtcctgaacccatctgagacttggggaacattagcagcttctcagtgcatactttctagggaaggagataatggaagaccctttcttcctgtcttctgtggtctctcttgggagcccaggtcttactcagaataggttctcatacttagaggaaactcagattgctttggtcttagcctgtaaatcaaagggtgaagactttttctgttttccttaagagagttctgccctcagtagagggcagagaaagaatatgtgtcattaatcacttgagaattgtttacaactataatctagagagcacttacttgcccatggcaggcagtaaagttaccttggttgtgtaagaataacctgagtggtttactcagactgttcacaaatgtttggacatcattcaagggctgtccaagtctgactagttagctttatgatatactcagatacactcagattcacctttataccatccaatcacatttaaaggagggtgtttcctgaaattgcaacattactgacttcccagccatgtgacatagcttttcagactctaagttaaattttaacccagacatctctcttcaattcaggtcacctacaggccagacaaagccaaggtcatgtattgagtgaatataaggagttttgttggttctaataactgtaatgttattcactggttgaaatactataccatggttaatcataagttgcagctgttgtgtccttttatttatgagcccttaatcaagaggacacagcaagagccactgtttgaaaggagcctttcatgaggtcttctctttgggtgctccttcttgtttcattgtgaaaagaagagaagtttatattgccttgcaaaagttattaaatagtatatgttggcttctctgaaaacagatttttctattccaaatttgaaagatcaaattataatctttatatttcagctgatgataatagaaacactaagcctgtgctctccaaacaatgtcttttaattggtgccaagtttgattgaatctcaatatcagccatcagaagttatatgttggctctctgaaaacagactttcctatccagaattcaggttttctatttgtgacaatatgtctctgctgatgttaaggtaaacagaccagagctctttgtgcagccctttttactggtcctgaacctgatgaatgagattttaaatgtaagtcaatctctctctccttttttaactttttggttttaaatcctcccttattttatgagaattcatcttatgagttacccttgttaaaatattggcatatccaggagtttgaatagggtcattttctgaatggattttggaataattaygtaaattgatttttctgatcaaggaatttagtgataggttatattttcaaatgtgttgattgtcagcttcatcctaaattgcaatgtaacacaaaagctggtacacagctcttttctttgagacactcaaaatgtttccaaactttaaattcatactttttactgataacatttttgtggatctcattcaggtaaacttttcttcttcacttgttgatcccgcgtgacccctccagccacacaggtttcatgtgcttccctgaatacagcatgcacttagcaccctttatagcctggatagtgttgttaccccagactagaattctttcctcatctccattacaatacttgacatccttcaagacaacactcaaatgctacttatatcattaaatttcctccctgatttctacttggacttaaatgttgctctttgtaccactttatttgacctgttgctgaagcacttagttcactgtaccttgtattttaattgattttgtacatgttttttccctcaacaagaagcaaacttattgaggtctgggaccatatcttcaagcagcctccagataattggcttggcacaaarttgcatgcatctcttgttttctcataactggatggaaacaatgatatttagatttatcagaactgctacagagggctaaagggatgcaaaaacacttggtaaaattcaaaattctctttaaagtagtcagtattgttctcaaaacaattacatcaaacttttagtgactgaagtgttgtaataatttgtgattttcaaagatactcaaaatttaaggtgaacagtgagccagaacacaagatgatayacctaatctcattcaccagtctgttttgaccaagtcaagttgaggcaagaatgctgggaacaagcttttctgattgaatgtgttaatttagcccgccttcaaacttcttaaccaatggcttccactctaccacctttcaacgcttttttttctgtaagatggcatgttatctgttagaaataatggggatcacattcattataccagcagtagtctctctgtgatcacactcattagactgtttactaccacgaattctgggagaaatggcctgggacattaaaagaaacaaacaagctaagagggctgtctaggaccaatgacagttattggatttgttttaagaattaagcttatgagttacacttttttcctttgcagcatagatgaaaatcatcacttgaggaacatttcaacatcatagttgcaagtataacttacacaatggaaaatgtttttcattttgagaagaggcaattgctattttgtaatggaacgcaaggactactggagataaaacttgcatgcaagaccagtacagcttgatgaagggagcagagtctagtttaacctctaaattaggagatgtttgttttaattttactgctattccaggcaagaaatattaagtgtctgctgtgttcaggactgctaaacattatggacaatacagtaatagtagaagacatggtgtctgcccttgagggagtgaaaattgaatagacaactcttaactatcaggatcaacaaaaaaatggtgttagttagggagtaataaaagtgccacacggctaactacaaaccagaaggccagggacggattactgtgaactcagctgctgtgtagctttgagtttcttgaatattgtccatgacccatttattttgttttaaatagagaattatatctgccctctaccaaatacacaggaataatctgagtaatgtttataactgtgatctgagaactttttgagtcttttgcaaatctgtaaacacagagtgagaatgagatatgacagtgtggtaaaagaggacttttgagatttattaatatttagaagtacaagggggaagaatacttttatagtatgattataatgttaaagatattcttcctttagttttataaaatgtggcttttgatcagtaagtggcaacttagaagaaaagtctatcctaagttgatttgctattccttgaccttaagaactatagaacactttattttctcctaagaccacttttttgtttttattttactccattcattaattcattcagcacataataacgaagtatgtacttggtggcaagcactgtggtaggacctggggatatgaagttgaagaagacctgggccatatctctaaaaaccttgtgaggggaaaccaagggggaaaaagtttctactattttaaataattagaatagattttattttatagttaaatttgaagaaaactacaattttagttagatttacwatgccatctttactcatttgttcactcccattcgttcatttttcaagttaatgggtgctggaaacctgagtcatccttgacatgtccctttcatttgccctccaaatgcaaacaaccacctgttgtttcagtcctttcaaatgcctgcctccagaatgagcattaaatctgtcaacatatttaccatctcagcttctccagtcacctcctaactgcctcccagtttccactcttacttacctctaattaacagctttcagacttttttgaggatgacctacaattaaaaaatacatccatgatactcccagtacacatacttgtgttgctatgtatctataagtaaatccaaaatcaaagattaacagaataatacgtatcttttctcagtatcatgcattttgatatttttaaaaattatattcctggccgggcatggtagcttacacctgtaatcccagcactttgggaggctgaggcaggtggatcacctgaggtcaggagttcgagaccagcctgaccagcagggagaaaacctgtccctactaaaaatacaaaattagccaggcatggtggcacatgcctgtaaacccagctacttgggaggctgaggcaggagaatcccttgaacccaggaggcagaggttgtggtgagccgagatcacaccattgcactccagcctgggccacaagagcagagctctgtttcaaaaaaaaaaaaaaaaaaacaattaggggccaggtgcaatggctcatgcctgtaatcccagcactttgggtggatcacgaggtcaggagttcaagaccatcctggctgacaaggtgaaacactctctactaaaaatacaaaaagattagctgggcgtggtggcaggcgcctgtagtcccagctacttgggaggctgaggcaggagaatcgcttggagcttgcagtaagcagagatcgcgccactgcactccagcctgggcgacagagtgagactccatctcaaaaaaaaaaaaaaaaattatattcctttgtcgctttcttgctgggcatgattaattaaattcactttatgatccattaatgatgtgaaatttactgttctaatacttttaaacacaggttgtttaaagccagggtgataggtttatattatttccctgcttaaaatgtttcattggcttctggttgtacttttagaattcaacgtagaaatcattgtatggcctacaaagtcctgcatggtcccactctgcctcctcctcactctttcctacttctccacatcttcacacaggttctttcctctccatggaataatagtcttccttccccaatcttcaccttgccaattgctattatyctatgggtctctgtgtaaaaatcactcctttaagaaaattagatctcsccttataattcctcttcctcctctttttattcactgtatttattataattgtataattatatatttatttgtatgacttttttatttaatattagtggcccrcactagattacaggttccccratatctaagaccagatctgttttgtttattgctatatctacaatacctrgtatagtcctagcataatcagcaaatattcttggtatgaactttggatcaaatgctrtgcttgccccacaaaggtgaataaaacatagactttattctcaaggagttctactcttttgacatggagtatactttgtttgaagacaggtatctaaaagacaaaacaggttaataaacatcttagaaagggtattagaatgctggaaatcctataaacaatggcttctttagtttaagactctaactggagggaagttttccttatttactcatgatactaactcaaggaaatgcaatgattttttttaaaggaagcagagatattattcttttattgaggtaaaatttctagagattgaaatgcacagatcttaagtggacaattcaatgagctttgaaaaaaatattttcttgtgttcccttccagtcaatctcaagcctccttaggcaatcactcttctgatttctatcactacagattagtttttcctgtgctygaaactcacatacgtagaaatcaagcactgatatctggcttctttcagacggcctttctttttagatttatccatgttttgtgtgtattttttgttaattccttttttagtaatgagtagtatgccattgtaaaaatataagacaattactttttagccattcttttagggatagatatgtgggtaattttcactttagggttattatgaataatgccattatgaatatgcttatacaagttctgtttttgaaattggtgggtcagaggatagacgaatgtttaactctaaaataaagtgccaaactgtttccaaagtaggttatacaaattttccattaccaacagaaatataaaataattatgtttgttctacagtttcactaagagcttttttctttaattttagacattccagtaagcttgaaacagtcttgcactgtaattttaattttgatttcactgatgactaatgatattgaataccttttcatgtgcttattaagcactcacatattcttttgtgaagtgtttcttcaatcttttgatcagttttattggctgtttgtctttttattgttggttttggaagtttttaaaaatatattctgaatataagtcctttttcagatatatgtactataactatgtcctcgcagtccgtggcttgtcattttaccttcttactggtgtctttattgagcaagttttaattaaaatggttagttctttttatagccttttaaagaaatctttgtcaacctcatggttgcagcaatcttcttctacacctttttctagaagctttattgtttcatctcttatgtttatgatcaatcctgaattaatctctatgtgtgtcatgaggtagctatcaaggttcatttttttcccatatatttttccagcgttctctagctatcttttgaagggttttctctttttattaaattatcttggagcctttgtaaaaattatcaatttactgcatatgctttactctaactggactctccatttcgttccacagcaggatttgctatctttacaccactcctatgttgcttaggctctgaggctttatactaagtcttaatatcaggtagtgcgagttctctgactttgtgagttttttaaaaaatcaatttttttggtataaatattttgcacttcatataaattttagattcagcctgaaaattttgagaaaaaactattaagttttcactgggattgtaatgaatctgtgttgaactcagggtgaattgacatctttaataatatggaattttccatgaccatgatcatgttttctctcccaattgattaggtctcctttaatttcactcagaaatatcttatggttctcagtgcagaggattgtgatggtattttgaatgactatgaataaatttttggctgatatattaagtcaataatagatacctttgatttttattattatttctatattattatgcagttctcagccttgaagtttgaaagactttaataagacattgacaccagtctcccacttaatgctggaatgctcaattacaaatccctggcaaatgttcattagactttgaactcttccaatgctggagaaataactgttacacaaaacaccctattccatttggggacagtttgaattgttggaaacgttctttttatattgagctagttttctgcctgttgtctgccctttggagtcatggagatgagtttgccctctctcctacagagtaccctccagctattcgtagatagctaatctgcccaatgaattcttttttcttgttgaaacaattctagtttctctacttattcctcgcatgacatgatttttgtatcttttctctttctctgactcttttgacatgctccagttttctgtattttctttaacttttggcatccagaatagaagcaacactccaactgtgtccagaccagtgcagagcacagaaagactattttttttccttactctgaacactatacttctgctaatctggccttaaatatcatcagggttttcagcagccaagtcacactgttggctcatgtaatgttcactgtcagctaaaacccctagatctttttcacatgaactcttattcagactgctcattctttcatcctgaacttaggcctgtaatagttttctttcttgtgttcatgtaatagagtttacatttattcccattcagtctcagaacttcagaccaatcttctagtcagtcttttgtggagtctataggcttgacaaaagaaaaaactcagactccagtgaataccacaaacagttatttgctttaggttcaggaaatgaaaaygtgctggttttaagtttctgaagttgcctccctccttcatctcattccgtcctcccccttcagttctttggtccgagacccaatagaggatgtctacagccastctccctctagggagggcctgggtctcatcttccacccactgccattcaataatagcttgggtctgtcttggctaagccaagggaacatccagcttcactgagaaaacctttgctgcatggtgatacgccacctacttgcactgtagcgttgtctggcaggtttggcccattgtctcccagaggaaacagaaaacaactccccagcaacccgccaatctcttttgtccccacagtcgagctctggaaaatatctgaatgccacagaagtgggagtaccctttgatgtttataytggctggctccttttcctttttgctttttctttttttcatttaataatcagggtagtagaaaatgcggagaattaaccgcatgacagcagcagaggaattcattagagaaacagagatgaattctgctcagatttcaggctctcaggcagaagacacaaaggagtaatcgtcttctagttttttttaatcatttcttttgtggcaccttccttgtccatgaaggcaatctcagcgtctggcatgggggagcccaagaacataggcagtgcaaatggtggctttgatttggggattattacagcaatattaaccacttccttcttacctctctttgaaaagatggagcttgtcattcttggagaaggcagtgaacagtgctatgttattgcttttatttaaagtattacccactaaaacttcattttaaaattgggaaaaatgtgcataacattttactatggaaaattcttgaacagagcaaaaaatgctgaggaatataattttgcaaatgtgttctcttctaacttaatatcctcagagacccttccttttatgagcctcaaagacagctttagtgatggcttacacaaaactaagtaaatttacgcatacaattttacttgaaggaagttggtaaaataaatcaataatttttttttcttcttgagacagagtgtcactctgtcacccaggctggagtgcagtggtgtgatcacggctcactgtagcctcaaccttgcaggttcaagtgatcctcccacctcagcctcccaagtaactgggatcacaggcatgtgccactatgcctagctaatttttttttttatttttagtagagatgaggtctcgctatgttgcccaggccggtctcaaactcctggactcgagcaatcctcccgccttggtctcccaaagtgggattacaggtgtaagctaccatgcccatccacatggttttttctataattgtacaaaggcagcagctggatccccagaagctactggtaatactaagatttccctcccaaagtcgaaagtagtcctgattgctttgcttaagtagtagagtttcattactattttaattcctcatgaattttttaaaaaatacaaatcatattcggagtttcatattgaaattatttaagagaaaatttttttctcaagtactgttacacactttaaaagcgtgtatgtaatttattgattttataaatataaatgatttgcatcttatgagagcaagttctataaagctctttcttggttacaatttttagcatggttttatttttaagtaaacatatctacctgaaagcaatgaaaagaacagttttgaatcttagtgatatttctggaaagagaactcattaacctgaagtactcatgcatataattaatttaaaaaccatttggttttaaccttaagctaatccaatcaacttgtgctttcatcaaacatttaaggcctaacagggacaggtctggtatcacaaaaactttcccagggaatactcttcttatggctcatcttaggacataggctgtagaactatgtcctagaaccagaccattagcaagtaagtcaccttttcataccatgtttctcctacctgtcaagcgaagatgcaggcacttgccacctgtcaatgggagaaaatactgtatatcaatcttttttatatcagtgataaggaggaaggatagtgatgactgtggcctgtagagggtatagggaaggctctgtggaagaggagagatttaaataaggcttamaagaatatgtaggatgttagtcaatgacygttttttgagaatattgataaaaaggcatttaagatatgttgcctgcttctgatttggattggcatagaaaaggcatgaagacaacatcagaaagggagtaaaagcacaggtgtgtcaaagcacatgcaggcatatcttggagatattgagggattggttccagaccaccacaataaagtgaatatggagaaaaactgaatattgtaataaaggtactcacacaatttttttggtttcctagtgcatatcaaagttatgttaatgctatactgtagactcttaagtgtacagtaccattatgtctaaaaaaccaatgtatatactttaattaaaaataatttattgctaaaaaatgctaataatcatctgagccttcagtgagttgtaatctttttgctggtggagtgttttgcctggatgttagtggctgctctctgatcacggtggtggttactgaaggttggrgtggatgtgccactttctcaaaacaagtcaacagtgaagtttactgcattaatagactcttcctttcatgaaatattgctctatagcatgtcataatgtttgataacacttaacccatagtagaactttaaaaatttgagtcagtcctctcaaaccctgctgttgccttatcaactacgtttatataatattctgaatcctttgttgtcatttcaatgatgttcacagcaccttcaccaggagtagatcccatctcaagaaactactttctttgttcattcatatgaagcaacgtcttttttttttttttttttttttttgagacggagttttgctcttgttgcccaggctggagtgcaatggtgtgatcttggttcaccgcagcctctgcttcccgggttaaagcgattctcctgcctcagcctcctcagtagctgggattacaggtgtgtgcctccacacctggctaattttgtatttttagtagagacggggtttctccatgttggtcaggctggtctcgaactcccaacctcaggtgatmtgcccacctcagcctcacaaagtgctgggattacaagcatgagccactgcgcccaggcatgaatcaacttctcatcagattttatcatgagattgcagcaattcagtcacagcttcaggctctacttctaattctagttcttttactatttccttcacatctgcagtgacttcatccagtcttaaacccctcagagtcatccctgagggttggaatcagtttctttaaaactcctgtttatgctgatattttgacctcctcccatgaatcatgaatgttcttaatggcacctagaattgtgaatcttttccagaacgttcccaatttatatattttgtgaagatccatcaggggaatcactatctgtggcagctataaccttacaaaaatttatttcttaaatattaagacttgaatgttgaaattattcctcgacacatgggatacagaatcaggcatgaaaacaaccttaatcttatgtatctccatcagagctcttgggtgactaggaacattgtcaatgagcagtactattttgaaagaaatctttttctctgagcagtaggtctcaacagtgtgtttaaaatattcattaagacatactgtaaacagatgtgctgccatccagactttgtcgttccacttctagagcacaggcaaagtagcttttgcataaatcttagggactctgggttttcagaatggtaaatgatcattggcttcaagttagagtcatcagctgcattagcccctaccgagagagtcagcctgtcttttgaagctctgaagctaggcattgacttctgctcttgagctttgacagtctgagatggcaccttcttccaatatgaggctattttgtctacatgaaaaatctgttgtttagttgagtcgccttcatcaatgatcttagctagatcttctggataaatttctgcaacttctacatcagcacttgctgcttcactttgtatttgtatgttacagaggtggcctctttccttaaacaactcatgaagcaacccctgctaacttccaacttttcttctgcagctttctgatctctttcagcctttgtagaattgaagagttaagcccttgctctggattagactttggcttaagggaatgttgtggctggtttggtcttctagctaaactactaaaattctccctatgagcaataaggttgttttgccttcttatcattcatgtgttcattggagtagcacttctaatttccttcatgaacttttgctttgcattcataacttggccaactgtttggcacaagaggcctagcttcctgcctgattcagcttttgactttccctcactaagctaaattatctctaacttttgatttaaaatgagagaagtgtgattctttctttcacttgaacacttagaggctattgtaaggttattaattgaactaatttcaatattggtattgtctcagggaatagagaggcccaaggagtgggaaaaagatggggaaatagctggccaatggagcagtcagaatacacatatttatcaattaaatttgctgtcatatatgagtgtagttcatggcacccacaaacaatgacaagaataacatcaaagatcactgatcacaggtcaccataataacataatcataattgaaaaagttagaaatattgtgagaattaccaaatatcacacagagacatgcatgagcacatgctattggaaaaatggcactaatagacttgtttgatgcagagttgccacaaccttcaatttgtaaaagttgaagtrtctgtgaagcacgataaagtggagtacaataaagtaaggtatgtctctagtgtgtttgtgtacattaagtggtggaagatgtgatttaattttttaaaaaatagccgtttaccctagataaatcagtaagagatgagtacaagtatgtatctacaaattatttttatttgtgctctttataagaattaaaaattgaaaaactcccaaataattaatgaagtaaattatctttcaagtatacactgtattgttctatagctattaaaaatcatattgtataaaaatatttattcaaatggggaaatactcatgatataggaagaagtgaaaagtaggttataaaacagaatgtatagtatggtccccattttgggaaatatatttacacttatgamaataaaaaaatcagacaggatacataatgagttgttagcagtggttatatatactctgagaccatgagttattttgatttttgagaggcgagtgtgcttgttggtgttttcaactctttcctaccataaaatgtattaattcactattcaatttttttaagttctaagaagttagacacttatttattttaggtgttatacagtccatagtggaaatttgagatgagtgacagaatgaaaataatatggttgcagacaaatgtgataaatatgtgtaagatgtttttgaatagacaaagcctattttaggagtgatgaattgtagcaataatttattgtaaaatgatagatgtttgaaatagggtgggagtggtaggaattcaaaggaagggatagatatgaaacatgaaggatgaatgggcagtatgtggtgaaatggctctgagaggtgagagagagaagactcttgaggacaagtgcaatgtttcaacctgcttaggataataaagccaataaaagatagagacagcttgtttgggggctgagataaaaggtttcaatccaggcttttttggttgttttttgtgttgttttcttttcttttcttttcttttttttttactttttatttggaagtaagaaagttgcaagaatgaaaacagtccacataacagtcaaatacctttacccatattcacctgttgctaatattttaccacatttgctttataatttactcgatctacatatgcatatatatgtataatatttttctgagccatttgaggctaaattacattcatcatgattctatacccccaaatacttcggtgtggtatttccaagaaaggggatattctgttatataaccttagtagagttatcaactttggtaaatttgattaaatacttctatctaatctaccatttatatgccagttttgtcagttggctcaaagatacaatagtgttgtttatarcactttttccctccagcataggatccagcataggattaggtattgcctttagttgtcatgttcctttagtctcctttaatctggaacatgtctacagcctttatcttttatgactttgtcagttttaaagaatttaagccccccctcttgctttttaaaaatttgtctgatgtttccttatgattagaatcaggttatgccttgtcatccaggtgatgttttgtccttgagttatcacatctgcaggcacataatgtccatctcccactcatggtgatgtaaattttgatctccaggtcaaggcattgtctaatttttcctttgtgtaggtactgtttttcctttaaaagcactgagtaatcagtgggaaacaaayagcttgctcttcatcactacccccaaatttattatctrttgatgattcttgtatagtccaaactttataagatgactgaaaaatcatgattttccatctttgacattccttccacattcgcctgtcaacagtagacattttctaataagcaggagctttttcttctctccatccaaacatgcatctcttaccagtttgtactggtcatggaatccactgttcttttcagtggttgatactgtaccaratcattttggtatataaactgtctcagatttagccagtatgttctggtatcatatctccaccrtctatttttttttttttaacacttccttgatttttggcataagttattctaggcacaccttgtacctactctgcctaagctctgaaatcacccattttcccaagaaaccccagttctttttttttttttttttttgagacggagtctcactctgtcacccaggcggttatgcagtggcgcgatctcggctcactgcaagccccgcctcccgggttcatgccattctcctgcctcagcctcccaagtagctgggactacaggcgcccgccaacgcgcccggctaatttttttatatttttagtagagacagggtttcaccctgttagccaggatagtctcgatctcctgacctcatgatccgcccgccttggcctcccaaagtgctgggattacaggcttgagccaccgcacccggccaccccagttcttttctggtggaaatagtgttaaagacyaagttctgggcataggtgtgctcattactattgaggtatcytggctcttggctctttcagtgaagtgaacttggggaaaaatacacacacacacacacatacatatatatataaatacacacacatatacacctacatatgcatatatgcatattttagaaatcatgaattgattcattgatatctccaattttaattcattcccacaggtttcttacttgcccaattcagttttacatggcttctgaatttgaaataataaggcaaaatggtagagatgttcagcttgcagtgggggaagatagaaaatcgaaattcacatgacagggtgaagcatagtgattaagattaggaagtcatccacacagagttaggagaaaatacatctagagtttgccaaatccaaaggcaagactgtaagaaaaagatactaaaagagaaaagagcagaggatgkctctgcattttgtgatacattaaaaagttatggtaggagaaggagataaattaagaatagcctggggaaagagatgtagagagtgaagtcaaagaagcaggggagccagtactaggtagagtcatggtggtcaggattagaaagaattccagcagtccaatactgcagaatagtcaaggaaaattgaagaccgagactgggcctttggatttgatatttggttaccaaaggtttttaaatctggatttaggaactcatttgagattttttttttgagaatataacttttaaataacaagtcagctcacgttaattaatgtttaatgttttggggacatttacatttagcttttcttaaccttttaaatgtgttcactaaatattattttatttctaactgcaggctaagcaagttatactgtgtgtataaagtgcccaagtctaagaggcattgtagacaggctatttttagggaaactcatgtttttctttraaagttcagctagcatttggaatcgatatacagtataatatttaaaaaaaaaacaacatatttcctcatcccccaagaggtttcttaaaatagcatgtaatcttacctacagtgggaaaagcctcaaattttataaattgggttggatctaacccagattacctgaccaagagagtccccaagaaaaacaaggtgtggtaaaggttatagtaatggtaattaagaaagttgtgttgtgcctgctgggcctcactaaaagcaatgacccagcctgtggctactggcatcattttgactgctgagacatgctttcttttggagagaagtccaaaccaaatctttgcccactttgaaagccaagatattctcattcctttcagccacagaaagggctggtttttctaacaggatcatgtccgtgtgaccttctgatgtatcaacttgttttctatgcagtatataaacaataaagggtttaattttagttgcttttcttcacagagtcatggaatattacaaatgttagaagctagagaggatctttgaggttatctgctttaagccccttgctttccacaggaaaacaccaaggctcagagagataaaatgtgtccatgctggacacagctggaaaatgatagagcttgaactcaggttaactgaccctccatgcaggtctgtggctgcaccatacattacagcatctctattcaacagtaaaactcattggggttatatattataccctagtggatattacatctgtgggatgacaagctgcattatgatagagttgcactgtgctcagcagcagttgagtagccagcacccacaggcaacctctatgggcaatctgaaagtgaaatctttactgaattgaatggaatctgtggagatcttcgatagtcttcccttgaggtgaaatcttgttttgttgagtggtttaagatgttttctagggtgtagcactttgcagaagtgctttcctctttcatgataggtgacccagtttggagatcaggaagattttgtcatccttcacattgcaagacttgaagacttgyaactcaaaatggtatatttttttcttttcttccaatagagaacaattccactctagcactcaagtatctaatacttttgggacatgttgaaactgtttccatttcatctgatttcactcagcaattatttatagaactctctgtgaggtaggcaccatgctaagtatcctgaggctgacaaagacatcctttctaagttgaggcagtgacagagggcacagcagccattgctaattgtccttgctgcagccttgttgggtgacacctctggcttccagggcctcatattttcacagcttcactgataactctctragaggaattgtccctcccactaagattcccttctagaagatgagtttttccatgagcattttaaaattttctttgttgccttgttcattttttttyccaacatttaaaagagcagaagtgagggcraagagaaaggagaatatttagatctgaaaaatgcaccagtccacttttaatctacttttgggaagatgattgtaagatattctgtacccacttagggatctcctgcccttcggatacayatgccttaactaccatcttgctagaatagaaggtcctgtgtttaggcatcaaagaaaggaattgcactgagaaattttagtgataattcttttattgtaatsgtgattttcttcctcctgctaatctttttaagtggtattaaaggaagcttcttgccaggcagtaatattcctccatgagcacacgatctttttccttatttggcactggaatttcatcaggctgtattagtctgagcgaaacatactctaggaataccttttttttttttttttgagacagagtcttactctgtcacccaggctggagtgcagtggcgccatctcagctcactgcaacctccgccacccgggttcaartgattttcctgcctcagcctcctgaggagctaggacaacaggcgtacgccaccatgcccarctaatttttgtatttttagtagagacaggatttcaccatgttggccaggctggtctctaactcctgacctgaggtaatcacctgcctcagcctcccaaagtgctaggattacaggtgtgagccaccgcacccagccaggaatatctttagaatagttctatagttaggaacgttgagaccaggtaacaagggatttattcaatgggatgacaatttttatacaccatgcctgaagcaaataaaggtgatcagtatttatattgcagtattcaaatactctggagccaaatagataggactaccttaaaaatgttcttgtacatgtgggtttgatcttaaagatattagggatggtaacataccattctatgtatatacatgaccaggccttaggttacttaagggtgatggaatgaccattgtgtgtgtcttgtgtcttggtggccttcagtgaattctgcatgagctctagtagtaactgccactgctgtagtatcatggaaaaaacactgaacttaaaatagttttcttacctgtaacaaaatggacaacaatctcacagagtttgtgtgagaattaaaggagaaaatacttgggaagaagtgctttgaaatctccattgcactctgcaaaagcaaggaaatgcgcttgtsatcagtatcatgttgacgtggagtgagttactccccagctgttcacgatatggtcgcccacaaagagcaagtaggtcacttcaccaaacagaattctgtatgtattacagaaactcccaggctgagtcaccaagtaaaatgaagggcagtgtgctctatttaaaatgttcatttcattttcgcattccattctttactaacagaatggtttcacttcatttccagtcactttcattttcaggttgtcaagcttcacttagtgtcagttgtgttcccacactcaaacatgtgccttgtcttccttgatcttctctctgaggatgtttctctgactaatgtgctgtggtcagaacaagagcattgccacatggtgcatttcctaggtaggcatgtctaaaatcattaagtggcctagctcagaacattctttgtgaccctttcccctccccacccagtgcctagtgactgatttatctgaatataagsctacttccacttttagttcaagggccttgctccctgcctgcaagaatctctctaatcacattgccctccctccacccgctttccccattgaaaccaatgtttggagaagatagaagaatgaaaagaacatctcaggtcctgtttttgtaccaccttcactattgtagcacctcttttgtgttgccaactgaatatggtatacatggctttaagggggaaaaaagaaaaataaaacataagaaagtaggagagctcctagctttcttaaatgaattaaaggccttaggccagagtgaattatattatagattgtagactagatatggtggggaaggttactcaacaacttggttgggaaataaattaatatataaaaccatcagatatcagagcatagttgtggaaagtcacctaaggaaagtcattgtctctaggccaaagactggcctagacgtaagtaatgcaccagtgtgtcagaaagggggttggtcgacatcagaagcacccagaggcaaacactggttgtgccctgtacccacagtaactgtccatagaaatgtgaatgttggtagtcttcaaagtttcagtgtcactggcaagtccttctttgttggaaattcaatttaacattcaagttctatagcaaatgcctcytattatgatgtcttgtgtttacagtttgcctctgtaagtagaaccctctaaagggaaaaatgctctggtcagattgttatggtctgtatgacagatacataactgttgtaaatcaacacattggcattctcgtttgctccaccagtttgttgtgaacttcgtcaggggaaggcatcatgcctaagtctattcaactctgggatactgacaaggtcaaatttctgtgcctgcaaggctgggactggacccaagctgtacagttcatacaatgaaatagtgccatttagtaaaaaagggagataatatggcacttggttggaagtttggctctagaatctgattgaactgggtttgaatactaggtcagccacttacatgctgtatgacctaagaccccgctctaaaaaggatattatctttacactgacctcagagggctgttttgagaattaaattagacaatccatgtaaaatacttgactcagagccttacatagagctgttagcagcagcaacaacagcagcaccagcagcaaggtaaataccaccatgtgtgtcctttgggtggtcagcagtttgctgaacaatttggactggtttagaaccctcctaactcactactggggactttccattggaaccacagcactgggtagtgacagaatttgccagtgtaatcacatcatttatgagaaatgatagcaatagggtttggtgtcatagtaatggaaaatggcactggacactatcctaattttgaagaaatggagtgaagaagaagacatgttccagaatgcacaggacattgatcttcagcaaatttttagagtggattactgaatgattacrtgtgagaaaaatgtgattattaggagtcaatatgagctcattgaaaacaaaacattcctatttctaacatccttaaagtctttcacagttcatcttattggttatggaaatgtcaagggatagatttttatttctgggaggagtttggctaagatttttatgatactcttgttgtcttgttgaggttaagtagattcatagctggttgaacaaatgtccactggcagttttgasctgatggatggactaatgtccatctggagaggggtcctcagggtaagcctcaggaacctgtctagtgatgctgttctatccaattttctcattaaaaatttctgacgaaagcacaaataatgtgcttttgcaacaagtgagataggattttttaaagatctgtgtaggttgatgggcggatttgctaataacaaccatatgtagcatttattgagtacttactgtgtgccaggcaaaatgctaaatgtgttgtatgacttctctcatttaatcctcacagtgaccctctgargtgtatactagtaatattccattctatagatagatgtagaggcacagatatgctaagtcatttacccaagtcccacagccaataagaggcacagatggcagaggaccatttgtctatcaccaaagcccatgctcataactgtattatgctactagaaccagtgagtcagaattttacacagattaatgtaaagtcctaagctaaggttaacaaaatagtatgttaagtcttgaaggaggaagcttaggttgatagcaagtaataaggaaaagatttagggacattagttggtgggaaactcaatgtgattcaatactaacgtatacctacttttaaaaaagaacaactaataggagggtgcattattagaatatagcatcatggatcatggtggcagtagttcttctctaagagtccatgtccagagtactaggtcaggtctgtcattaagggggtccttgaccattataatcaggagaataagaggtctggatttacatcctaagaggaaaaacggtgaactaatgtcaggctggaaaagagaaaaaccaaagaggaatatgaagacaaccttcaaatattaacatagttacatgatgagaaagagtagatgccattggtgtctaagagagtaaaaaaatsacttctcattccctgttgagaaatggactctggcatcaggttgatggagaacaaaatgtcagctttattccagtaaaaccatattagagaatgtggcctgatctgtggctacaatcaggccttttatacccttccctagttaaacacactctcagagtcaggtaaggccctggacaactgttgtttgcaggaggagggcagttcctgtgtgaaggagaaggagaaagtgtgcatcctgaagccaggggtgcacctgacttctcgactgtgaatgagagaggaggaaacctagttcatatctgcacaaaaattctttttggtatccttgaagtgggctgaaacaaaaaagatcaaaatgttactctagcaggaggccactcatggaaaccttaggcaggggaattgtgttacccctggtacttaccaactttaacttcagtggggcaaccaagccaatggagcactcttatctctgaaatgtttggcctctgtacagaatgatgtgaaaaagaatcttctagcatggggaggtggaggggagggatgtctagattacttctacggcccccactccctaagattcttttgaaatcagttaagacacgcataaataaaaaaactccaagtaaagcatgtcagtattttaaaggcttatttgtttgagcaatgagagatgatcagtgttctaagtgctatggttcatcatgttctggaggtggctttgttccaactgtttgttcacgagtgttttgagttaaagggaattacagtctacaaatttatgcacatggcacttcacagaatagaagaggccaacttctggcctyttatacccacatgcaacaaatacagctcgtgtccttcccccaggactcaatttgtaagcctctttattgcattgtgctgtagtaaaaaattctcagttttgtgggcaacctgtgaaaccagccttcytttatttcaactttgttgttttgcctttatactgtgaattaaatgaatccttgggggttctaattatattatggaaaaaagaacttgatattctgagaagctgaagaacaatttgttttcctcagctaggtatttaggacttttaggatttagttaccattttcaaaaaacttgaagaagattaattatctccattgcctcaaatgacaaagatagtatgttcaattctctcctgagttatcatcataataaccctatattcttaatatggccttttatattttacaaagtttctcaatagggaatgagaagaaagtgattttttaatctcttagacaccaatggcgtctactctcccttatcatataactatcttaatatttgaaggttgttttcatcttcctcttcagtttttctcttttctcttttaccacaataatcatcacaaataatcctgtttggaaggtggagaagaggaagcaagacagatattattgtacccatttcagaaataaggagaatggaactcagagagtggtggtgggaacaattaacaaatgttttctgagcaccaatctgttccaactacctgcagtagtgcatttaatccttataatagttccgggagttaggtgctattatccccattttgagatgaggaaactgtggctcaaagtgttagttgcccaaggtcatgcagtattaagtagaagaaccaaaattagacccaggctttctggttctgaaatccatactcttaagcactaggttgttaccactggagaggttatgaacgtgcccaaaggcactggctgcctagtagctgaggcagggccagaacctgtctttagactgcttagcacatcttctagatcctgtagctgcttcactggttttcattaactttggggtttttcaatacaaaaagaggaaacaaatgaaagctgagccgaattttgcttttgtaacatagaggaacttactcagtaccaaggataatctgaggctcttatgggatttttttaagtgcccagtgttgtttcatattctgtttattcttcaccaccaccaccagtaaatgcaggtggttcttgtctcatagtgattcacatgtgggtttatgccaggtacacctattttactacttttggcatttataagggcaatatgtttctgaactaatttggggaaaataagttcttatattaattgtagcagaaaaacaaatgggaaagtcagtgaggttcaatgcaaagagctcagaccaacctttggcatcagcccaagcagagttggaaatcccagcttagtctcttcctaaaagagggactttaagtgagttactgaagctctctaaaaacctatttctttattttaaactggagataacacttgactcatgcgttgcgtttgttagagagaacaaatgaaaaaggtcgttaagggtttattggcagtgaactgtatggtaggtgctgtgcttgtgtttgcttcacttaatcctcatgacagccctaggagataggtattattatcacctcctgacagttaaggaaattgaatcttaaggacatgtgataactttcctaaagtgaactctaccttaatgtgttggaaaagagtgtagcaaatcaaatatatcattcagtttctccaaagccatgaaatgtctttaagtctccctgaaagatttcccaaataaggctgtcaaagtcttcttaaagaatcccatctaagttctattatcccagtggttcctttatctttttatttcttgccataaaattaaatctagaattacaaagaagtatttcaaagtatatataatattcctctgttttatggatttacatatcacctcctccatcagcagggattaggaggggtgtaaatacttggatagggctcttttccttggacttcctcacctccatcaacaggggtcaagaggagcctggacagtaatccctgtccgacccccctctcagcctaatcactactatttgcctcaaacaatcttatttcatgaggcctttgatcaatgttgagattagtcactgtaagaagcctgacttgtaggaaaccttttacctcccagactctaattcttctattccgtttctccccaagtcctgtgtcctctggaattcagaatctgtcattggcaagatctcctgtgttctcaaccccttctcagaacagtcctttcaccttcccactctaaactgaactgtggctgtcgcctaaggatgctgcctcccctgctgctctcctaagtggtggtagtgttatcttccccagtctcctatgacaaggcctggaggtgggctaggtgtcctctttcttgttccccactgctgctttcagaccattcttcatctcctcttttctaaatccagccctcctcccccttaaaatcttatgttatcagttatctatagacctctgtgagcttaatcctacgcaatgtaaaggcatatctttctggccaatcaatatggagtttatggcacttttataaagaaagtggataatggcctcctgatcaagaacataactgctattttcattagtcggtactctatgatgcgggtgcatggtccaggggaagtgggttcaggcccatcagactgactgagagttgagttctttacccactcagagtcaagaattgtggtatggggggaagcactgtgtgaagcatcctacaggggtctgttctgaacactgaaaatgtacagtccctgtcccagagtggcattctcaagatttttttcttgatgggacttgtgtggctatgggccaaattaaatttaatataagcctgactctcatagcctttgtagaggaatgaaaccagaagaatttggagcagagagtcgggcactcatagaatatttttctaaaacagaggaagtcatggaagactcagggtctagagtataaagtgtttgttacttaactttgaaaggacaactttgtataatttagcaaagccttcttgtttaagattagtctctaataagtaagagggccttgctggatttcttcataattctcagtagttaccagaagtcagaactattccttatctgtaagtaacaggtctttagattatagacctagtggggatataactttaatgttgtacagttaaatcaacttcacactatttacaagacatgtcatacaacactgaaaacaagaaattagagtatgtggaaactatgctactaaaattaagcagcataaggaaaattaatgtaagcctataagtcacagcttgacttctgtttcagcagctgacccagaggcaatgaagccaaaaacaattttaagacctgttctgttctgacttgtaaagattatttgatgttaaccccatacccttatcccctttccaagtgagtaccaggggttaggaaaaagatataatattgcctggctcatttctaatcaaactttaatgctggcttcagcaaggccagatgcctactttttgtaaatatcattggcagttggcagtacatttcattaacagtttttatggctatcagtagtatttttgatactctgaggatgagcactagagaaatatgtgcttgctgaaaagcctgctaatctctgtgtgataacttaattttgctattacctgaatgtaagtgctattgatgtggcattagcattgatttcatagctatttaataaagagacagaaacttcaaatgcataattatgacatcaatatatgaatctttctttagagatgaaaaacacatagttaaaaactgtgaaaaactgccctgcttatatcagaaaacttatacttctctgttgaaaaaataggcaactaaaayagtttacaatataatctaaaaggatgaattggtggaattttcagtataactggaaggtatgatgtgttagatagtggggagagtgtatatatattatcaagccacaatattacaacctgacactattagatataatagattatgcagccaaaaatgtggtcatggacagtgataggggagcagaatggttcggtaaagtaccaagtctggtgacaggacaatgggaaaatttctgcagcctgatggtctgggtagttggatataagtctgacagcagagatactttcatatttagggaaaacctgcaaaatactgaaaagattaataaagagaaagggaacttctaaatagctaaaactcccggcagagcagcatagctgacagagcaccataatcttgcgtatcagagcttctcaattcctttggaacaggagaatttgataatttttttctcccatgaggatgcactatgaaggaaaccgctaggaaattggaattattttaaagtgattattttaacattaacttggtagacttcatctattccatagcatttcttttcttttatcccattcaattgcatcctctctataggattaatgcactcttgaaagtgtcaccttctagccagtggccaactaacacaaaaccaattcactaaacaaaaacacaacaaaggaccctcagagagtccacttcactccctgctacctccactggagcaggtactgktwtcctcggctgcaagacctgaagacagatcacatcacaggacgctttgcagacactcgccagtaccaacccagagcccaagagctccactagatggctaggcccagaagagccaaaacaatcactagagtttggctctcaggaagccgcattcctgagagcggagcaccacctaagggagcaccccgtgtcccaaagaatytgaacagcagcccttgaatcccagatcttacctctgacatcgtctacccaaatgagaaggaactagaaaaacaattctggtaatatgacaaaatgaggttctttaacacccccaaaagatcatactggctcaccagcaattgattcaaaccaaggtgaaatctctgaattgccagaataataactataataattcagaaagtgaattattaagctaatcaaggaggcaccagagaaaggtgaagtccaacttaaagaaatcaaaaacatgatacaggatatgaaaggaaaattcttcagtgaaataaatagcataaataaaaaactctcacaacatctggaaatcaaggacacacttagagaaatgaagtcccagcaatagaatcaaacaagcagaaaaaagaccttcagagctcaaagacaaggttttcaaattaacccaatccatcaaagtcaaagaaaaaagaatttttaaaactgaacaaagcctccaagaaatttggtactatgctaagcatccaaacctaagaataattggtgttcccaagaaagaagagaaatctgaaagtttagaaagcgtatttgaggggataattgaggattaagtgggtttcagatgcagagatggtttaacatatgtcagtcaataaatgtgatataccacataaacagaawtaaaattaaaaatcacatgatcacctcaagagacacagaaaaagcatttgacaaaatccagcatccctttatgattaataccctcagcaaaatcggcatagaagggacacaccttaaggtaatataagccgtctatgacacacacacagccaacattatactgaacagggataagttgaaagcatccctcatgagaactggaataagacaaagatgcccactttcaccgcttctattcaacatagtactggaagtcctagccagagcagttagacaaataaatggcatccaagtcagtaaagaggaagttaaaccattgctatttgccaatgatatgatggtatacctagaaaacccaaaaagactcatccaaaaagctcttagaactgataaatgaattcagcaaagtttcaagacacaaaattaacatacacaaatcagtagctctgctatacaccaacagcagccaagctgagaatcaaatcaagaactcaaccccggccaggcatggtggctcacacctgtaatcccagcactttgggaggccgaggcaggcagatcacgaggtcaggagatcgagaccatcctggccaacgtggtgaaaccctgtctttactaaaaatacaaaaattagctgggcatggtggcgcacacctgtagtcccagttactcaggaggctgaggcaggagaatcacttgaacctgggaggcagaggtagtgagcagagatcacgccactgcactcaatatgtgaaaatgaccatactgccaaaagccctctgcaaattaaatgcaattcccattaaaataccaccaacattcttcacagaactagaaaaaacaatcctgaaattcacatggaaccaaaaaagagcctgtgagtcaaagcaatactaagcataaagaacaaatctggaggcatcacattacccaacttcaaactataagggcatagtcaccaagacagcatggtactggtataaaaatagacacatagaccaatgaaacagaatagagaacccagaaataaagacaaatacttacagccaaccgatctttgacaaagcaaacaaaaacataaagtgggaaaaggacaccctattcaacaaatggtgctgggataattggcaagccacatgtaggagaatgaaactggatcctcatctctaaccttatacaaaaatcaactgaagatggatcaaagacttaaagacctgaaaccataaagattctagaagataacatcagaaaaacccttctagacactggcttaggcaaagacttcatgaccaagaacccaaaagcaaatgcaacaaaaacaaagacaaatagatgggactcaattaaactaaaaagcttcttcacagcaaaagaaataatcaacagagttaacaaacaacccacagagtgggagaaaatctttacaaaatctatacatgtgacaaaggactaatatccagaatctaaaaagaactcaaacaaatcatcaagaaaaaacaaacaattccatcaaaaagtgggctaaggacatgaatagacaattctgaaaagaagatatacaaatggccaayaagcatatggaaaaaatgctcaacaccactaattatcagggaaatgcaaatcaaaaccacgacgtgataccacctcactcctgcaagaatggccataatcaaaacataaaaaaataatagatgttggcatggatgcggtgaaaagggaacacttttacactgttggttggaatgtaaaatagtgcaaccactagggaaaacaatgtggagattccttaaagaactaaaagtagatctaccatttgatccagccatcccactactaggaaaagaagtcattatataaaaaagatacttgcacatgtgtgtttatggcagcacagtttgcaattgcaaaaatatggaaccagctaaaatgcccatcagtcaatgagtatacaaggaaatgtggtatatgtatataccatggagtactactcagccataaaaaggaatgaaataacggcattcacagcaacctcgatgaaattggagactattattctaagtgaagtaactcaggaatgtaaaaccaaatattgaatgttctcactcatatgtgggagctaagctaggaggacacaaaggcataagaatgatrcatgggactttggggacttgcgggaaaaggttggggtggcgagagataaaagagttcacattaggtacagtgtacactgcttgggtgatgggtgcaccaaaatttcagaaatcaccaccaaggaacttactcatgtaaccaaacacctctgttccccaaaaacctattgaaataaaaaaaataaattaataaattaatgtttgtgttattcaaatacccataggagaagtaatctccttgagactggagctccattttcttcacttttctatgcctggaaatacctcacaaaatgactacagagtagttacccaagaggtatttgttgactcgttatctcttacagaattttagataccatctatacttcttttcttactgtacattttccctgggtgagctctcatttattcctgcggatgcacacataccctgaccagtcacagatctctacctccagctcaggctcttctcctgagctccagccccacgtgtccaagtgtctgctgggaatctcctagatgttgtgggctaactccaactcagaatgcccatgtctgaactgttagtatttctttccagaatggccatttsttacacttcccctaccttggctaacaggaaaatcgttatctactcagttgcctaaatcacaattttgaggcgtagaaactttccctcgtcctttcctcccatttttaatcaaacatgtttacattcttctttttccttctggtttaggatctcctccaagacggtttctgtctcattacttattagccttgcctaggccaaggcttgatttaggatatgtatgtttttaatacatgtctaatgaatgggaattttttgtagcttttagattttctgttgagaaacacacataaacacatactcacaaacacgtgtgtgcctggaagcacatacatgtagtattcacccaagtcgtccaagttcactgagtcctgtccagacctttaattctctcagtttatttgtgagattgttgtgtggcacaagcttacaggcatgtgtaattgttaagggaatatggattgagaactctgccatgataactcatagctccttctgggtagttaagccttacatcccattctgccaaacccttctcagacattcaaccattttctttctcccttgttaacaaattttttaaaatattttttaaaaggaaagaaaagaaaatcctaccttatgaaatyatcttggccttgatgagaatcttggccttgatgagcttagattctcaattgactattttccattctgtcactaagatgtatttggaaaacaacaaataacccctgagccctgctattgtttctttatggtttatgtttcatgctgtgctgcttagccagcagggagggaggcttaactgacaaacccagtttttgtagctgtgctgatatcatccacaattcaaagccacagtgaaaaattacaaatcagcctcagccatgtttttttgttgttcttcttactgagaaacacacatgcacagacaaagaagttccatgtttgctgagtgggaccaagcaatcttggtgtagaatgaagaaaaaatggtgaaactatggagggtgaaattatttaaactgtaaaaagcaaatgactttgttttccggatcttttataccacctcctttgatgcagcctgcttcctgcatgaagcctgttttgtttgttacttgttttcttatcctgagattgcgctaaaattgcatgactctgttacaattcttggataacttttcaagaaccactttggaaaaattattgtacaatagtatctctctggaatccagttttattctctcccagtcacttactttgccaatggcccattagctgtgtaagtgatgtagctcttccttttttcactcatggattacttctgcttggcatatcttctttcaccttgagcagcagtcaaaattttacttatttcttaatattcaacttaaatatcacctttgtgaaaagcctttcgggttcatattattatgatctattcatatttattcagttctctagtaagtactgtatgcataagtaggcatctgataaatatttattaagttgatattaacatatggcttaagaaattgctaattttataatacagtagttttattttttatgcaaacaacaaaagacatcttaaaaagctattcttttttttttgagaaggagagtctcactgtgttgcccaggctggagtacagtggcgcagtcttggctcamtgcaacctctacctcccaggctcaagcaattctctgcctcagcctcccgagtagctgggattacaggtgtccgctgccacgcccagctaatttcatatttttagtagagacggggtttcaccatcttgaccaggctggtcttgaactcctgatctcgtgatccacccacctcggcctcccaaagtgctgggattacagatgtgagccactgcgcccggcccaaaaagctattttctttttaagcctcaacaatacatattaaaaaatacaagagaaagaatgtttgttaagaaaaaaatttagacatacaagtgtgcaatttagagaaactttttttctaaaatattataaatttagaaaaattttgcaaacagaaaacactgtagggacaatatatgataagtaaattgtacttcagcaactcattgctttttagataccactgaattatttgcactaatggaggaacattgttataccaacctatttatatttgatccacattttaagattcctgttcagcttatttactttcttacttatgtcttatctggattcttattaacgttagttctcccttacttgcttggaggagaaatcattagaaacatgctgagaactgggagatggccacttcaagtttaaatttgctatgaagaagctaccaataaccttctttcagtctaaattaaggtggcctgtagttttacaacccaaagcatgattgtgggatgctaatttagggaactattctgcagaaaccatgacacaatcagcttgctggtccgtatttagaaccatacttggaaattgtgctcaggtctgcaatttgtaattcatgggtaggggttgaatctagaggtggctgagagttcagccacaaaggtgataaaaggattgggaaagaactatgaaggaatttaaagaaactgggattagcttggaaagagaggaagataaagagcaatttaatcgcaatctttatgtacatagagaagcttagcggaacacagtgaccagtgttttctgcctcacctgaggacaacacaagaggcttaaactgcaatatgagggatttgggataggcataaggaagtatctactaacaagcaaaattggagtagactactgagaaatatggtagaatttccatctctgaggaytgaaaatgtatatattctattcctttcgagtgttttaaggtaaatcttgctcaaagatgttgacctgaacttgatggcttcctggaaatccattcattgtgtgacattactgtttttagaagcttcttcatagatggcagggaggagcaagtacaccaatcaagtcacgggcagtgtgatatggagaaaagggctccaggctgagaggcaagggaacttgattgctgtctctgatgtactgcaattagttgagtgttcttatacttgtcacttaactcctctgtgcttcggttttctaatctataaaatgagggagccaacctaaatggctcaaaaaggagtttaaaagtaagaaagcataatattcagtaaacataagctaaaaccctctcccgggccagccacggagcaagacttcttcacgtattatcttctagagcatctcatctgatatagtttgattgtgtccccacccaaatctcaccttgaattgtagctcccataattcccacgtgttgtgagagggacccggtgggaggtaattgaatcatggtggtgggtctttcctgtgctgttttcatgatagtaaataagtctcacaagatctgatggttttataaaggggagttcccctacataagctctcttgcctggtgccgtgtaagacgtaactttgctcctccttgccttctgccatgattgtgcagcttccccagccatgtggaactgcaggtccattaaaccctcgggtatgtctttattagcgcatgagaacatactaatacatcctccaacccattttacaggtgagcaaactgagggccagagagactaagtgacttgccagttttacatagctagtttcagttctgggtagaacccaaatctcctgactcctaggccaggactcatttattttactgagctaggtctttgataatcatgctttgatacagtctttgagaatccattctagtttttctttacttcgtttctttttttcttccagaaatgtttattatgccctactaaatgataggcactatgttaggtacagaatggaactctgatggactcttccaggattttaaattcaaaactcaagtgtttcagttagtgaaggaggcttctggatctttccaggcatgtagatgtctttaaagatgcaatcaggcctcctcgtcacaagtgtgtggccagagatggagaaacaaaagattgacataagtatcctccaaggtttggagtcacttctggctttgcctaagaaggcagtagggcactcttgcctttcttcaaatagtctcttccctttctctccctccaggccccagatatggatgcttagcatgacttaggcgaaacttttccaactcccacaactgcacccctgttctctccttggggtccaaggccagttattcagtttgaagactgcctgggtttaaatcctactttcccacataccaactgttgaccttagattagttacttaatgcattctgtgaaatggcagtaatactgatatccacctcagagggttgttataagaattaaataaaacaattccagtagagctgtgattcttactaaaaaagtaataagtgttagcactcaataagttttagcaatttatattaatatttccaatgtagcgataatactgtcctcctcagcaatggtcccttcagcccagttttgagaccaaacccctcccaggtctttttaaattgtgcttttttcttcagggtccgtcaactggggtatatttctgtttggagacagtgtacagacacttacatattcagattctatagtctgaccatcctaagttcaaatccctgctctaatgtataattggaggaaaccttcctgtaagtatgatgggcatgcctacataacggctttgaaatacatgtgctggccattcatgaatttaatttkgttcctttagaaccatttaacagagcatattattatgccattaattattattagtagtaataataatgatagtcattatgtattaagggyctactctgtgttagcactgtgctaaatgttttgcatacattatatctaacttttacaataaccctctaaagtaagttgtttcatcccccttttatacctgaaaaaattgagactaaggaaggtaaataaattgtccaagattacaagctagtaagagacagagccagaatttagtctgaaaatcaggtttctgtagctccaaagcccaaagcccatgatcactataactccttccttaccatctgagatggtaaggacaaggcatcttacctctaggttgggagctaaagatcataatggtttcggccttactagtatgattagcttagtgaaaatatgattcacttagtgaaaatatttatcagcttaatgaaattttattagcttaatgaaactttcattagcttaatgaaaagattttctcttgctggcaaaataattcatgtactgcttaatcaatgttgaatcattattcttactagatttatacaacctatttcattgtctcgcctttaacacagtgtgaaaatttgctgaaaaactgagagatgtcatttttagaaaccaacatctttgatttttttttaaaagaacttagttctattcatcattttgggtccatacctaaaacagctcttgatgtgtaagacatgctttataaatttgtgttgaatgacatgaatgaatgagaattcagtctggttaaaaacagctttattttaaagcacttgatacagtgaaatgagctgtgsacacacgtcaaataatctattctctagatttagcctggcattgacccgctgtgtgacttacgtcaagccactatttcttgactggccctcacatgcaatttatcctttgcaaaatgatgggatttaatctaaatgattgctaaggttccttccaggtctcagcttttgcagcttcctatagactgtgaacatgggaatacagtctgattttctcagtgactcatctgggaccctagaaactggcagattgggaaagaaaactaatattctctaaaactgaatttcttaacttacagattataaaactctactttttaccatgtctaaaaattcagtattcgtggaacagctgatattatcttttgctgatgggcaaaattaacaggcacctttgagacctagcttcatatctatgaaaattcattaagttgaaagttcatttgtaaacaagcttctctagacagctgagaagtgattgttctatcttgcattgtatatattttaatcttttgtattgacctgtagtcatctcactggtcaagctaacatgtttttgatagccaagagttggaaaacctggtcactattggcctaattgtactcttggaccacccatggaactcttggcaattagattttcttataaaactctttcctagagggccctttgtggataagatgagcctcacattgcattttagaatagtacgtgctaagaagcagtgcaagtaaaagtgtgacattatagaagatgcctctggcttactcatcttcattatgacaggaatttgccattgtcaatgtcttatatgttgtagaatgagaaagaaatgactctttggagtagatatctgcaataaaatctggattgatctacttacagtcagtttcagagtaggcagtctccagggcactgggagtaactagactctggtctccaggcctaggttcagctacattccctacaaggcctttggcgtgtacctgttcagttggtcagtcaccctgtttccaaacaaaggacatggccctgaaaactatacacaacagggcaagatcctggctctagtttgggattcgtcatgtctttttagttaggcaagccttcaatttaggggacaggatcagagctgtgtcatagatctcttatatctttgtgccctatcttgccctcaagactgcctcatctctttgattagttcctgatgctgtcatgggctaggccaccttcctcatttcctactaaaattttcactttaactaggttgaagcaactcatatcatttctagcatgtcactgaattctatccctgctcttcagaatcagttacactttttcaactaggtatccagcactgagaaggcacagaggagaccaggcctgtagccagttgagaggttacaaaaagcatcaaattgtaggacagtcttatacaggtgactttctcattcagtgtaatgtggattatataagttgaggctttttgattgcaagcaatataaattactttggctaactgaaaggaaaaaagagtaatttttgaaggtatagagagtgtgtcatagaattgaaggaaaagtagaacagattttcagagtaggacatctgtgggagtagaggaaacagaaactaatggtcacgtcaaggcaccaccactggaatgagttcactccagacattttctgttaaacatctttattgtttgactagtcattcagattcccagcagagaatctgactggctttgattataagcctacctcttagccagggaaggccctgtaccttagatgacagtcctaccagcactgcccataataaaggtcaggggtggttacccaaagccaagcacttttggtgttcctaccaaaaaaaggacattcaaaggcaacagatgtctactacaaaatctgttctatgggatctacagtgagggaatagattcagccttacagctaaagaaacggattgctatgcagagatttctgcttcttaggagttgccaaaaagacccttatccggcttaggagttcttggctgtgattttagtgttcttttgtttcccaagtatttttaaaatgtaaatcagtaactagcaagaggcatctttggtcattgtagttgcttggagtagaataaatttaaaaaattctttgatgtgagaaaaattactatcatcattatcacacatggaaggtcaacattagggccagtcattggagttaaactgtcagaagaacatcccagttactttctcacttttgagttgtgtagactgacaggatttgagtctttgagggctttgactagggtaactgacctcaaaacaaatagctagagggatatttctrcttctatccgctgagggatttgtagcaagaagccatattgtggatggtatattttaataacaaaggggattttaaaaggaggatgacacattgatttggaatgttttctcaactgtatttacttattcttaaatattttccttcatgctttctttctcaagtggatgaccagctggttgccacctttttcttctctctttgcctctgttcctaatttctttcttatccttaaccactccactttccttcctccaatcttgttttctctctaaatctttcctccaaccttattgaatctctccccttctttttgttatctggtcatttgatctataatttcgattccttttcctgaaattccctcctttttccttttcccctaaaccatcattctagtcctccccacacccaagcttcttatctctttgctgttaatctccartgtgtttattgacttgtgtgccaaaaggcaaaatccccagccccctcccaaccatgccagtkcattgaaaagcagcagctgtcattgctcaacaagttccttgtgatctacaaatcaatggataagaattctcacagtgaargtttacatgtatatatttgtatgtatatatgagacatgtgaccatgtttaatgaayggagaaggacttggatcttttctagtagagaagagaagcagaamgctttgcctaaccctatttctttactaaggtaatgaaaaaattatacagggaaaataaatgatgttaatgagagaaacagggacaggagaccaataaacaatcatcaggcatgagaatatcttgctgaacttattattgatagtagacacaggaatgtaatataaatgcagtgatggaacagaaagcagactcaggaaagaaagagatgataataaatagtaataaaatccaagtgattcatatgctcaagtgaaagaaagaagaaagagggcagtgtacacaaagtaaaagggcaagaaaatggaagtagagtcatcactcgtagagataaatagttgggaaatatgagaagccttcctgacatcagtaaaatattacatgttaaacagcaaacaaaagacaacaacagtgtctgtagtacttttggaatataaaagttagataatactagagtagtatcttcaaaataagcaacttcagaaatcaagtccccagtaaagggaattggaagaatttgaatagatgaaataaggagcagtggcaagtgatacaaaccttaagcaggaaaagtgattttaaatggtactggcaggttaacaactggcaaaaagaaaaaaaaagaaaagaaaagcaagatggtgctatatcccccaggtgctgggaaaccaacctggcctaaaaaaggagcagacccacctaactttttgccaagcactgtgctaggtgcattgcatacacttttaatttaagcctcgctgtacataaaagtgaagccaaggtctgagaatgatatccattgggaggaaaaaacaggaaaattttctgagccagttccaaagtcataaggctcagggggaataactttgactttgtcaagtcagagtgaacagccagagkcagcagacataggatattgtcagaggtaaatcaccagcttggtctggtctgtcttattgcaaggtcagaggaccatagcaagccagccaaatgttttcaaccatggaaatcccctaactttccaactgctgcagtcccacagctctgagcttttactcacaggatggctcccttccagctttcaaatctctccaagttgattaatcattttcttgttctgactyattcaggcctctagaaaaatagctgtaggtactggaagggctatgtagatcaaggaggtcagataaattggcttgatgttggtctatagaaaaatctagaagatattgccaaaagcttttaagcataccgtcttcagatgctgggatgtgggctatatccacaggccattggctcattcatgtgtttgaagcagaatatttttgtgtgcattaggagacttgggtatgttcatttcttaatgtaatgttagatattgtaagctggttgtttagacagtagaatttcattgtgaccacttatttttatatctatttagatggagtacaggccagattataaccccctaacaagaacagcaacagtaaacacacagatagtgcttattattagttaagcatggtactaatattttccctaagaggccacattcacaggactgaaatgtcagttctggttgtctgagccaagggcatatatgctgattacattattttgtctggcyaatacactttatcatgaagcttattttagaagaaatgttcatttttagatttctgtttgtatatttaggtcatactataaggtccattctcttgcttttataataatttagtcttctgctttattcattcaattcatgaacattcattaagtacctgagtatgctagtcattggagatgcagttgtaactaaggcatcaccccagacctgaagttttatgttgtgttttgtgcttagtgattggcataagtaaaatacttgaggaaacacagaagcagcagcaaatatttctgcaaaggagaagagaaaatatttgagttgaagcttcaagaatatatcaacattttccagtttgacaagggtgggaggagccccatcaatacagggaacagcatgtggaaatgcaaagaggtgtgaaagagcatagtatattcagggtgaaaaaatacattttttatgaattgtagtagaaaatgagccgaaataggttaagttgaggtaagattgtgatgggtcttacagcatactaaggcattatcctgtaagtaatagaagggcttatggaggttttaaagaaagagagtaacttcatttgatttcttttttcaggaagagaattctgatgatagtgtagggtggaaaaaaggggtaacaaaggaaccagtgggaaagctgctgtatagtctggaagtggtagcagtaagaggagaggtgaagggacagatttgagatgcatatcagaagtcaaatgagcagactactgtgactggttggatacaggggtgggtgtttgagtgggacctccagttaggaactcagatgtctggatgggtcatgctgccttcaacaagaaattcagaggaaaagcagccttggggaatgatgaggtcattttgtaacatgttgagtttaaattaaggcactaatgagaagagacattcaggtggagaagtccaatggacgacaatagtatgggtcaagaaagaaagctgagaagtatctgaattacaattatgcatcacttaatgataggaatgtgttctgagaaatgagttattaggtgatttcaacattatgcaaacatcatcgagtgcacttacaaaaacctagatggtatagcctgctatacaccttggctggatggtacagcctgttattcctgggcagcaaacctgtagagcatgttattgtactgaatactataggcaattggaacacaatggcaagtgtttgtgtatctaaacatagaaattaaacagtaaatatatggtataagagatcaaaaatggtatatctatgagggtacttaccatgaatggagcttgcaggactgaaagctgttctgggtgagtcagtgagtgcacggtaagtaaatgtaaaggcttaggatattactgtacactactgtagattttataaacactacacttaggctacactaaatttattttacaaattttcaacaataaattaagtgtaattactgtaactgtttgactttataaacttttaattatttttaactttttgactcttttgtagtaaaacttaaatcaagcacaagagaaaatgatatacaatcaagaggtaaacaggagatatatgaggctgctgctgctgttacatataatattgttttacagtaaaatatttttaatatgtagaaagagtacactgtaaaataatgataaaagtatagcagagtaaaaacaaaccactaacatagtcatttattatcattatcaagtattatgtgccgtacattattgtatgtgctgtgcttttatatgactaacaatacagtaggtttgtttacaccagcatcaccacaaccacgtgagtaatatcttgcactatatcattaggacagctacagtgtcactacatgataggaatttttcagctccattatattgttgaccacgtagcacataactgtacttgaagccaagacagccaattagatcaagcagaagaggagggggccaaggacagtagtgtattctgttttgctttttttcctcttaagagctgagatcttcggccgggcgcggtggctcacgcctgtaatcccagcactttgggaggccgaggcgggcggatcacgaggtcaggagatcgagaccatcccggctaaaacggtgaaaccccgtctctactaaaaatacaaaaaattarccgggcgtagtggcgggcgcctgtagtcccagctacttgggaggctgaggcaggagaatggcgtgaacccgggaggcggagcttgcagtgagccgagatcccgccactgcactccagcctgggcgacagagcgagactccgtctcaaaaaaaaaaaaaaaaaaaaaaaaaaaaagagctgagatcttacctgcgtgcatgtgttcattgtagcactattcacaatagcaaagataaggaatcaacctaaatgctcatcagtggtagactgggtaaagaaaatgtggtatatatacactgtagaatactacacaaccataaaaaaagaatgagatcatgtcctttgcagcaacatggatggagctggaagccattatcctaagtgaactaacacatgaacagaaaaccaagccatgtgttcttacttataagtgagagctaaacattgagctaaacatatagacacaaagaagggaataacagacaccagggcctacttgagggtggagggaggcaggagggtgatgatagaaaaacttcctatcagatactatgcttattacctgggtggcaaaataatctgtgcactaaactcccatgacaggccatttacctatatarcaaactggtatatgtgcccctgaacctaaaataaaagtttaaaaattaattaattaaacaaataagagaagaggtcttgccatgttgcccaggctggagtgtagtggccatttgcaggtgcatttccgctactgatcagcataggagtttgatgtgctctgtttccaaactgggcaagttyaaccctccttaggcaacctggttgtcccctgctactgtaacgtcaccatattgatgtcaaatttagtgaggatacctgatcagcattgtgtcctatagcccagaactcctgggctcaagcaatcctcctgcctcagcctctctgggagctgggactataggtgccaccaccatgcctggtgagattgtgtatcaaggaatttattcatgctatatagagagttttaggagttcaccaacagggttttacaaccatgtttgttgtttttatggcagaacacactttggattctgttcttcttctacatatgactaacagactttttaatgaggtctgatgcctcaatcaaaggctagtaaaacactgaccccttctaggccattatctttgtgtctatttggggaggagttggggagttgttctctgaaacgcaaacatgtactcctgctcagctttccctggctgacctggattccaaatgactgttggctcctctatatagatttgcagacatccacacaaaggagtgtcatttgtatgcagccccttaactaattgtaacagtctgttccttaagtctctgagaaagcacacaaattgattccccagcacttgcctatttttgaggacacctgtatgacccttcatcaaaccagctgacacaytctgcctgcctttattcacctgctatttcaattatgtgagcagtgatgtatctgtctcaaaaatctctgtcctgggaaatttcttcagaagagaattattggaaaaaaatttttttgctgtggagccaactcagggctttaaatcttttccagcctacagagcacctggattcaagtgtctattccctcctgactctggaagaatgagttacatcttgaattgaggatcataagcacattgagaaactatgagtttatttcttcctgctgttaactgaagcaatgaaaaataaacaaatctagatagcccagagccagttttaagtatcacaagatggggcctagcaatgtactagaacttaggagccttagtttcaaaatatttttaaaaactttattgaaacatagttcacataccatcaaatttacctatttaaaatgtccaattgagtaatttttgtgtattccctgagttgtgtaactattgtcattatcaagtttgagaacatttttactcccaaaagaaatcttgtacccattagcagtcactctgcatttcttctccttactccccatcccagccctaggcaaacactgctttctgtctctatggatttgagatttttttctgctttttagctattataaataatgctgctgtgaacatttacatgcagtgttttacatggacatgtgttttcatttctcttttttttttttttttttttttgagacggagtcttgctctgtcaccaggctggagtgcagtggtgcaatctcagctcactgcaacctctgcctcccggttcaagtgattcccctgcctcagcctcccaagtagctgggattacaggcatgcaccaccacgcccagctgatcttttgtattttagtagagatggtgtttcaccgtgttggccaagatggtctcgatctcctgactttgtgagccacccacctcggcctcccaaagtgcctcagcctccgaagcatttatcatatgaatatatctccgagtagaattgctgggttatatgttaactctgttttcttttaacattttgaggagctgccaaatcattttccaaagtgaccacaccattttacattcccaccatcaatatattgagggttctagtttctccacatccttgccaacactttttattgtcagtcttatagccatcctagtagttgtgaagtggtatttcatggtgattttgatcagaaacatttttcacaaaatagaattccttagtttagtttagttttgttttgttrtttttttgttttttaagatgaggtcttgctctgtcgccccagctggagtacagtggcacaatcatagctcactgcagccttgaacttctgggctcaagcagttctctcacctcagcctcccaagtagctagtactacaggtatgtaccactgtgcccagctaaattttaaaaaattttttgtagagacaaagatctcactgtgttgcccaggctgatctcaaattcctgccctcaagcaatcccccttccttggcctcccaaaatgctaggattacaggcatgagccactgtgcccaaccatatttattgctttttacaagaaaaagttattgataggttatgctaacccttactcatcactgtaacactcagcttggtctcaactcttaaaaccagaccatataatgtaatacaatgtatccctgcgttgtggtctgtggaacacctgcaattaattctatcagtttggggttgatgtgatactggttaacaattcagattcctgcattccaccagggatcagaatatctgaggttggagtgtgaccttgggcaagatgtgttgctcttcttagcctgtttctggatctatatcagagaactggtcatgatgatatctctgtccttttcagctgtgatgttctgtagcattctgtgaaccactatcaggagacactagttctacagaaatcttgggaccttaacaacaacaacaaaatgacaaatatttatcaaatagtcacagcatataatgcgctatactggttaccaagttcacatagataactaagctgtggcccttgtccttgtagaaatacagcctcctggggcccagataagacaactgttatctgaggaaaacgcctccactccctcctcacttccctcctgggcacctggggggatgtggttagacacctgtccttcctatggcatttctcctgcttattcgccccttctctgactccctttctcaaggtgtcaccaataccagcacagccactcttgatggtattgagtttaccaaacactgagaaatcctaagtgtgtcaagtcagcccaagaacacttacaaccctgctttctgcctgacatggaggtcacaactgctttctcatcacacgctgatcctccagagacggaagcagtcatcctgctccagcctcagcctctamttcccaaaaagctgtccttctccacagtcttttttttttttcttttttaaactgggcaccaggactccattctagtgcctgactttgatatgttttcttcaactcactgctctcttcttttgttcactgttctctgtcttcttccactcacctatctcatcagcccagccctgtggtactgccccagttctgagaccctggagttccctttataatctccaccagccaaaagaaccatatgaggcctctttacctagcagactcttgatataactatcagatattccaacaatctcatttcagatactttccattgtccctttaagtatacattgctgacaagagccctggtttttagttgagaaaatcaggccagtataactgtaatttaatatctaaattaaaaagtraaaggtcttaggttggatgtgaaaaagctacattagtcacattgttttgggccacaactgttccttatttttacacagtctgtccatccagaaggccactgtctgtccatgagaacatccacgaaggcatcagagctgagagaccttctcactaaatgtgacactgacactgtccaggagccgcagcctcactctatcagcagctgaggtttttatagggtgcccctattaccctgggtgttgtatctaccattataaagactgccttggatctctagttttttttcatctcagaacagacctcattgtgtctatttggagccccagcccatgcctgttgtgtgtgtaataagtgcgatgacttagaacagcgcctttcactccaggagctggaaacctttaacaacctcaactccacttccttatacagccacttagggaaggacagacaataaacaggaacttctggggattgtctgttcaggaaaagcggagagaaaaagaagacatattttttacttacctaagatttcattagaggtgccttactaatcaattgccaggcagttaaaagtgataaaggatgattctttatctaacgaaagaaaagccaactgaagtttcagctggctcaggaacttgcttttcatggtgaattgctagtagagtaagataaagcgtccagagtacaaaatgcctcttgttttcatgtggcctgacatttgttcatatccctgcccttgtttacttctcaaagaaacaggttctattcccgtagtcgtcccaactcactcataggtaatgccagactcaaggacattagcccaaggaaatttgccttgatgtttttcttcctgaagaaatattggactgttttctatttcttcaagttatgctatcaaagaaagaaaaattatcttacgcttttgttgggtaagtagggaagaagctgagaaggaaaaggaaaggaactagcatatgctttgcctcatgtactaggctaggcactttacctacattatcttattaagctaaaataaaaccaaattcatgtgacaagtctgcaaagcaaagcaattctagtgagcttaccatctgtgcttgtttatcgtttgttagccagtagctgtttggatgttatcatagctttcaccccagatatctacctgggcctagtctatgactttttcttgtctttccctttaaaatgtggctctgggaggcggagaaacccaacgtgtgtattctttcctattggaagctgctatacgtggttggaacctagaatctaaaaacttcttctctttccttttttctcttctttcttcctttgttatgagaaaaacctgttctctttttaaattgtcaatcaggcgggcgtggtggctcacgcctgtaatcccagcacttcgggaggcctaagcaggtggatcacgaggtcaggagattgagaccatcctggctaacatggtggaacaccatctctactaaaaatacaaaaaattagctgggtatggtggcgggcgcctgtggtcccagctactcgggaggctgaggcaggagagtggcatgaacccaggaggccgagcttgcagtgagctgagatcgcgccactgcactccagctgggcgacagagtgagactccgtctcaaaatataaaaaaataaaaaaaaattgtcaatcatggtgtcatgataaaatatttcgcttcatcattttggctaagtctaattaacataggttccatttaaatttaaaattttttagttctcaggttttattttttttttaaatagttaaaaagtagtttctgcccatctccctgccctctccctgcaagcagtccagctcatgtatgttttgtctaccattcccaagaccatcaaatgattcccctgcccagtcatgtctcccttcatgaattctggtgccacactgagtttctgtcctactcctatctcttttgagctgtgcaaccttgggcctacactcagtttccccatctgaggatacttattgggttgttatgaggattaaatgattctggcagtgtctgccgggtctccagacttcccctgcttatgttgaccctgtatacagctgccagatcagtttgtctcagcctggctatacctcagctctgaagcttctctggtttctgccacctgtgccttgctatctgagccccttccaggctactccacactaccctttccagatctgtctctcactaatcttcggcataaacccttgtcctccagccagcctggactagtaggatttctgtaaagatgcatttgttttcttcactttagacttggctcagtccatcctgtttgcccagaatgaattcttttctcatcacacttcaaggtacgctccgtagctgtcctacccagggagtggttggaggtgactgccaacctctgaacccctagatagtctatacgtggaccgcacttatcacagattgcctggaaatagaagctactaacacatcttgtttccctgtgcaggttgtagaccccctgaaggtagaaagtctagtttttcttacatatcagtgcataataaaaatttgttgaaaaaataaagctccttttttcaccttttcatctcctcattttgaattcagtagtttcctctaacgttcaaacagaggaaggtagggtacatagcaatcaggactttgccttacttcatcatcatatacttttcaagtacctgctaagtgtttaaaactgtgctaattgctggggttaagaataatattatagccacaatttactgagcccttcctaggtgctaaacgccatgctaaataagtacttttcacacattatctcttttaatatttgtgacaaccacatgaggaagatattattattatcagtatattattatgtaagctctaggtcagagaagttagtagcttactcaagatcacccacctagttagtggtagagcctcttaattatgggatatgatctactcctggacatgatcttgggcatggaggccctagaaagcttaagctcaccctaaaggagctgatgctagaggctgtctgctgatcatactccccataggaggacagcaagtgcttccttgaaggaggctcttggcaccacattttaatgtatactatactactaataataccataagtagtgtgtgcatcatatattatttattactgttattaagatgtgctctccggaattaatttacatctaaaacctgggactatttaaaacagaaattttaaaggaaatcgatacccgttgccttcagattgctcattgctttgattcacatatgataattaatgatatttctctttttttctagctagggaaatattttcaagattattaaattttttaaacttgcgaaggttaaaaaataaagcattattcatatttttccctattgtaaacttttttatattatgcacacttttaggcagaaacaactttctgcatgttaatatttctaatagtttatctttttggttaagtcatccagcttctaagaattattgagtaacatcgctattaaattgtcatggttgatgttattttatattttccgagacctagaccttgctgatttttttgatccaggcttttccttccttagggaatttagtttccctttgttcacttatttatagctctgctgtgggtatggtttggagccttggtttttattgctttaattgcttggtagtaattgacacactgtacacattccaggccccatgttccctttacatatgaattcacactacttgatgactcaaataggctataatgaatcccctttatcctgggatatctttgagattctgggttaccgtgttgatctgtttcctttaaacatggttctggcagtgttgccctactggaaacaactgacctttcatttctgctggtatttcatcattatgggtgcatcccaatctaattatatgttgatttgtaatgaacagaggcttcctctcatttaattttctgttgactttatattccctctgtttggaaacctccaagattatggtatcagtttcaattttgttaaactgatgtcttttcgtgatgacctgcttccagtgtattacttttttattcagtgattctatcaaccagtgttatctgttaaaaaaacaaacaaaaacaaccactgatatgctggtgggctctatgctgtcatctaaaatgttrtagaaagatctgtttgtattgttattgttgctgtgaattagtccaatggcctacctactatataagatatatttgaccttaggagtgaaaaaaaaaatcttaacgggaatcctcactgaagtctgatttgggtacaataagaattcatcaaaaacatagaagctgcatttcctaggaaatcgaggctttttcctgtatttgggagtggtaaagaatacgcccaagaacttggaacagataaagcattggcagacaaacaaaagatctgtagggcaggacttcctttttattctcctgagctctctttcccattgtttcagagaagatggagcaaacacccagacagaagctgcttcagtattgtcttctattgataggctgcttgtgttcagtgattcctctggcccatagtgtctgctggacagttggaggctttttgaagccattgtattgttagagaataattagagtgaatgaaacagtgggtaggggttaacaacaattctttgttgcaagcaattggtagtcttggcatcagtattggtaacaaggccaatctactggaaggaatcgaaacaaaagatggaaaagttgtggttggtttgtctgatccatccagcaaatccacccatgcatggccattgtgtcctgtgagctctctggaaatgcctttggtcacactgcattccaagccackgggtgggtaatctctgggtagtcttgtacatggatttcctagactttcccataacaaaaatggcaaggcacaggtgttgtcttggcaattaatcatacactttataaagaaaacaatgtcctaacatttgggtagatgaatggcrtggtagaaaagccccatgatgtttcttttggaaggagggttaaagaatgccgtaacactaactagctcagatgtgtctattgataccaaggtgaaaacatctaggcaaaaccataatctatgtcctcattgtctcctccatctcctccagacctaccctgtcctcgtcctaggagtttatattgtgatctagaggaggcccagccagggtggggtctaacaaattggggtgggtataaatttagtacttcaaagatagtggctcttattggaaaactttataagctgaatgcctatytccccctcactaatttggggaactgcagctgctgctaaattctgagtcaaatagacttgcaactatggttgatcagatttgtgatgtattagtaacacatggaagtggtgccttatgtcggggccctgggttcctactggaaacccatcacttagatttgtatgatattggtatgatctgctagtgtgtgatgctttgttacatcctcttttcaagtcagctttccaccagagcttcccaagaacagagaggcctgcctcaaatatttggttcaaattatgcaacataarttaccttatatctcttttcctgttgcttatctaaaaggacagagactcagaggcagtttaaaagtggaggtgggcatatctccaaggcgatttatgactttagacgcatatccctaaaaggcgaattcctgctctcacaagttgaatagggctctaatcccacaatctgatttaggccaagaatgacttacatttgaaatcccaaaccaagactgttcaagattggtattaaagtcggagcaatgaggtggaggtagkgttcacctccacattattytgagaatgggcctgaccctcatggatctgtgggtgtgaggagtggtggttgtcaggagccggggaaggtagtgcggggagtgaaggaggggagacagcagtgtgcttattttcagtttgtcagctgctctggaaaatggccaaaatgaatgagatacaacaagccttcagggctgctgtaagccaaggagagacaaggcccctccttttaaaaagctctgtggaatttagacttaaagttttatatgttattttgtttagggtaaatgtgaaatccctaaacactccccaggaaatgttagctcccaggaacacacagtgggccctaactccctggacagaagtacgtcttgagggagaaaaaagaattcagcaccattccatgaagcctcctggctctgtttggccatgggagaaagattgatgagaaccatgattagatctgtctctgtggcctccagcagattattggaaagccttgaaaaaaaaaaatctttttgacaaaaaaggatagaagttccagtagacaggggaaagaaaagggctaaatcttccaggccaaaatatgccagggtttgtacaaaccagggagatggagcaaagctgagcacttttatgagaagaggcactggcatcaatctaaaggagagagaatctgggacatttaagaaaagggggcttccatgtgggaagaagggcttgtgaacccagtgtggttgtgaattctgtaacggaagtcaccagctgggctttttctaggcaggagttatcttctttactggcaatcatgttccaagtttaatctctcctcagtgtgactttggtctcacgttcacatcatgaaaactccaggctgttttttgctatactcctgagtaatgttgacatttctaaggagagaggaaatctggataaatagagttcttttcttggcattgttaaaaatattactaaaaagagcaaagggtgttttcagagctaagtggaagtaaagtctttctttgcaattttgaaaggccaggtaggtggctgggtacgcactttcttgtagcctgtttgttttagcccgcagtggtttctgagcagctctaagttctgataaaggacacaaacacacccatgctacagtggccatctcacttaatgctgtcttttctatcctgtgactgaagagcaggggctcttgttcatgcccagtaagaagtaaaccctgaactaaacatcacacactgagaatctcttcataatctaggcacagataatctttaacactaaactactgtgaaattctaccagcattaagtactgtatattgccctgtgcttggataggctggctaactcgtaggaagagagcactgtatggtatccttttgctttattcaccagcattttgggggaacatttcttttacattttaaataaaacttcagcttgaaaaaaaaaatgtatgtaacttgtaggacatttctgaaaattacattatagctagtctatcacggattttgaattgtctttaaattttgctatcaaaagcagaacaacaacttgtcatcatagaactggaaggcatggttattttgtttacctcttactttttgcccatttggaaactgaaattgcttaaagttacatagctagttagtgcaggaacggaaatgaaaaactatttcctgatgcctggtttatcacaatggaaggctctgcccacaagaaggaaagttcagttcagattccctgtaattttaagaactttcatgaatatactaattttagtagaaacaactaaccaagatggcttatcattctcaacggaacataattttaaggagaaacacttggaataatctaattttaaactgtaatgctaattctttattagtctatttgggggattttttatatgttgcatgacatacttgcacattttcctatttaatacttcttttaatcctgaaagcacttatttaagaatgatcactagcactccaggacaagttaaatacagaaagccatatacatataaatggcagacataactgcaaaaagagaacaatatagtgagggaaatggtcttcagggtgctgcaaagcgctttatagttacaaaatgccttcatgtacatttctaattgatcctcaggacagtgttgtaaaaggaggaagaatgtgtgtgtaagtgtacagctgttttccagaacaccaaatcgaagctcagagatattgcacaactcaccagcacagcgaggaagctactgaattgggactcacactcagaccttcaccccaagcccatagctcattttattacttcataatgcgttagttgcagaagtaataatactttaaaaagcaatccacattttttctgtttactctttcctctcttcttcaggacagaaactgtactttccttgtccagttccagtttgtattattgtattcatggtatttaccttacctggagggaataggccttttaaatatcattaaaattgggtttttgaggttatgttcttttctccttcacatcctaaacttcagacctcatgctctttggccttccattcaattcaaatgagaagggctgttgtaattgttggcaatgcctccccaggctgccactgtaygtgraggatcttcrtgtttggaaagaaaaaaaaaatgcagtttagtgaagttcatgattctacttttactcttctaacatagccttttttttttaatttatttgtttgtttttacatgtaacactaggtggcagaataactacaccacaaagcaccacatcctttgtttctcactactctggggagtgggtatctgaatagtgaggcataaaaccatctgtggctacatgagattggaccaaccaacaaggccaatattttcttgacagggaactggctgcagtgattctaaaacgtatgcttccaagatactgtctttaagatttccatctttcttttttccccagctcccctggattttaatttctctgccccattgcactctgctagcagagggcggacacagcctgcaggcagctgctttgaaatggcagattgggatggatgtgcccattggtgctggcaccctcgcctttgtgtggcagtgggtcatgaagggtctgggggtaaggcacctgagtccttgcccgaatggcaccaggccctctggcagaggggcagcagtggctgggctgagtcasttggaagatgctgccctcactaactcaggtttacagaacaggtgtttttaaagagcagtctgatcctggttcagctctgtcaccggtttggaaatactgccgtgcagtcggtgggtcattgcctctcagtttcttcctagcaatttgctggtgtctgctaccctggatgcctcacatgccacaggacacactaagctaaataaagcagagcaagttctgtctttcatgttgtgaagagtatgaacttgggctgcggaaatacttctttggatttttgctgaaaaagaaaagaatagcattaaaacaaaacaatacttaccaactagtaataatactctaagtataccctacattaagaaactcctgtaaaaccaagtctgaatgtataaaatcgatcaaacaaaaaggttgtattttaattacaaaagcgttctttgtaactggaaccacaatcggatttcattaaatagtgagcttctgatgtgaattgtaaatgttttaatctacaaaaaaaagtacttaaatcttgacttttcaggaacccacttgttatataaaacaaaaaccaactggactatagttttacacacatacttacatcacaccctcaccactttccgactgggaatcctagagtattttttagtgtttagctggaggtccaggtagtgtcctaattttgcacacacagccctggtgacatgaaagggcattgttgaaatgaccaagtgagtcatggtaatcagggcaatcctgtaggttagagatatgggggtcttgtttatttgtttgcctgctagagctgcaattctttcataaactacatgacttttgaaaatacctcaaacaacatatataaatcagaccaaggatattaatctcaggccaccgccatagtgaggctttgaagccaggrgaaggtggtgagaccttcttgtttgttaaggaagaaatgtcataaaaattccaaagcaggactcaaatttccaggggagagggcctctttattgtttcctctaatagctgctttggcgctttagtgaataaatgtgttgcacaaagtaaccctagatgcatctgaactttagtctggcttggctcccacttttgtatttagcatccattctgaattatttatttaagatatttttgctgttgtttgtcactccttcttcctgtctccctaccagtccccctcattcgtcctgtctttattttyacacttctctaattaattgatatcttctgctcttagcactgcagcaaatgtgcctgcatttttatgtggatcttcactatgcaggctatgcttttaagtttctggaatagaatgatggtaaaaatgagtcatggcttgtttctatatttgtttctgagtcaagaagcttaattttcttactataatgcctgagatatcaagctatacagtttacttttaagggaaacaatcacaatttcatcaattcctttaagtagatgttttcaaatattatagaattctttggatttgtgtttccaaaatgaacaacacaatggtagtgctattattgttttaaggagaaaaagaagcatatccaaaataggtaaaatcttcccctaaatcccctgggaacaggcctatgggtgttgccctggcctgctcacagccccaggacaaccggcattaattcactgagggcctcatacctacatctcaatgactgcttaaaccagatacctgagggtctggggtctaacagaagaaaaaaggagagtagagctgagggttatggaacattccyaggaagggagagaatatcagaaaatgcaagactgccccagtgcagcagcagtgatgcagccagaggttaccagaagttctggcacctccaccttcatggacacaagctgtatatatcagtttaccatggttttcagtgtaaaaaagcaacttatgtccttcagtgtcagtttattgagctcttcagtgcagcctcataacktatattaattgggaggaaaatgcttccagagaaaggagagatgctggacaaaacaactttgtctttgactagttgtcaaggccctgctgtttggagtcattgacaagtccttgattcttgtatgacagatccaggggaaaaaaagaagtgattcatcttcttctgttgcacctttcaaggaggaattaaaaaaaaaaaagattttgcttatggacttaacatcactggcagcagtaagtgggctctgactctttgcaaggtataatttaccattgtgctcctccctcctgagtttatgcacctcgatgagccccggcccattaaaattccttcttaaaagcaggaggtgaaaagagccaagcgtgtgttttttttagaggagagtgtagctatacaaggaaagaggtcccagtcctttttctattttaaatgctggtaaacaacttgaaacctgttaaagcttttgaaggaatgtggaggagttgtccttttgactctaatgttggggaaaacaaaataaaggaaataattttaagaaaagagactttcccatgatgagctttagtctgaagcatcctgcaggtgtcacatctgttcctctaggtgtgcagattaatttcagttgcctccatgtctgctgggtccattatctttgctcggctgggtccaacatctttgctcatttctctactgaactttttccaactttcagtgctgtgcttttccatctcagcccttgtcaaagtatgaaataccatttgtttgatggtgagacagaatagtgttgtttaaagatgacatgctaatacagttatgtaaaaattctccattttgtaatgttacaggaaaaaaacaccagtgtccgttatgactgaacaaagttatcactcagccatgttatctcagtcatgcacatcaagattgacctgtctgccatttggggaagccttcataatttgtaaggtgcaggaaggaactagttttaattgagatttaagaggaatgtctttcacagccaatagcctttctttttgagtcccttatttctaaagggtcttttgcaacttgtacaaaagagcaagatccttcattcctcttttaatcctacagcctgcaggagttgagtatacctataaccaggcagctaaattttgaaacaaggtggtgaagtttaaaattacattttagctgtggaaatttgagctttagagaatgattacgttctgattgtcttggaaatattctctgtatagagactcaaatgtgggtcttccctattatttatcccaacctcttcagaaattatatgaatggaagagggagaaataagagccatctaaaattatgtaaatctagctgggatgtgtatttttgaattgacatttaaatatggtcctagcttatattctggagattcaatacactcctccaagccttactttattccctacttcttcaccacccttccgtccatcactcatacacacatgtatgtgcacacacatgtcttttgccaaacaatggagaaacatacatggtattttaatagggtcacacttatataaactgttttgcaacttgtttctttttgtataacaacattgcaggaaaaaatacactttattcttttttaacagctgcctattaagtcatactgaatatatacatacaaacccatttgttattgatggatatttaggtggcgtctaatttttcactatttcaagcaatgtttcactatttcaagcaatgttatatgttctttttttcttaaaaaaggaatgtagccaggtgtggtgactcactcctgtaatcctagcgctttgggaggccaaggcaggcagatcacctgaggtcaggagttcgagaccagcctagccaacatggcgaaaccccgactctactaaaagtacaaaaaaattagccaggcatggtggtgtgtgcctgtaatctcagctgctcaggaggctaaggcaggagaatcacttgaacctgggcggcggaggttgcagtgagccaagatcatgccattgcactctagcctgggcaacagagcaggactccgtcaaaaaaaaaaaaaaagaatgttcctcattgtaaatttggtcaaattctccattccaaaaggcagaaaaatataaagaagaaataaaaatcacttagtcataattgtctatccagagatacctttaatactgtagtatatttatttccagattttttcagtgtatttgtttattaacaaaattggtatcatgccatctgtagctttttttttcatgtaacattatacttaagatatttcctcacatccttcaacctttcttttggaaaaatttttctgtatgttgtgttttgtcttttgtgaatgtttgtttagttttctgttcttcgcgtttctattggaatgttaatgtgtgtttttgtattggcttatacagtaaggctattaaccttttgtctcatatttgtttcagttatttttcccagtttctcatttgccttttaattttgtttgtggaatcatttatatgcaaaagtcttacattttttgtataatcaaatatgtcagcatttttctttataatttcttttaagcaaaacacatttctttaaaacacataaaatggtagctaataagtgattttgaaaagtttccattattattactacagcttttaaatctgtatttatttatgctttacagtaacccccctgtggggtaggtaatgttatctccgtttcactgataggaagttgaggcacagagagtaatacagatagaagtgacataaatgagattcaaactcagggttgtggacagtactcttactcactaaatatattgctatatattttactgttataattggcctcaaatattatcctgctctgtcttaacaattactaaaaacgagaaaaatatgcatcatttattctagtttttcaaatagttttataattaactctattttgtctggatcttatcttgatgtgcagtgttaggtgaagctcatatttaatttttctatttgtcagtgtccccagtatattagtgcctctttaggaacttggaaaggacttgccttctctaagaagcctttgtgattagtgccacttcatgttacttgtttctgcaattgtttatttcttcagaattgttggtttctcagcagctttgatctgaatgattttgtggaatctcatgttgctcctagattaaaagatttattttaaaaaaagaggtgctgtctcttcaagtygtttcattctttacataagaacagggtgggaggttcttgtcctagttagcatcagcccctctcccccaaccctccacagtcagcagatccatgaatttagatgagaggaaagccacatctccattttcactaacctttaactgaaattgattatttccttcaattttgattgtgggcaaaaaaccacagtagtattagctgttcctgggactttaaaccacagatcagatagttaatcttgcatttcagttgttccaggtacctttaaatattctttatacgcatcactactttgacaatattgtagttgatccaccactagattttgccattaatgcattaagaagcacattcattaatatttcaaatattcaaagctattttggaaactatatttctataaaattagttttctttgtaatcctatatgttttatttacttaaaagtgtatatattttatgcacttagaaacatttttctgagaagggcttataggtttcaccaaatcaccaaagggatccatgataaacactgtgaagagttcttgtctgtttgaatacaaggcataccattgggccttgtaaattacccactgggtactgagtaatcaagaggcaatttaggaggagctggaaaatagtccaatatattcctctctagtgctttgattctttcacttctggaataattctctttatagtcctaaagagaactgtgtattctctttttctccatctcctttgcctttcatcctccccttttcctctttttcacttagtattttctttctttcacatgctcccttttttttctttctttctcattctcttcttccttgactttgctctttttcccttttcttcctcttccttttcctctctccccactaaaaacattaatatcttacggagtttgtgtttcaactattttcagaaaactttttctctttgtggtctaagaaagagttcaaagacagagataaacaaaaagagttgacagaaagagttaataatatcaacaagaagttgaaagcaagatttgtcaaagataaacataaggtaattatctggaaatagttgaccttagaggtcacctgcctggtttgctggtctggcccctgggaaagcccttgtaccctggttctggttccatcattccaagtcctactttcataccttagttacctaattccttttataagacaatcattcacactaattttcaaagtcccacaaggagggacttgttttgagacaatgaggcaattagactgtattgttgagttacagtcatttctttgagattagttcgaaagtatatatattcatggacaaaagttatcacataattttctcacctaaagtggaacttttgatacctgtaataagttagtagtttctcaactgcccataccatgatctcacctatctgctgcaatgtaatagtcattgttcatggatgcctatttatacaatgtgtattgctacagagcttttccttcttaaagtaatttctatgtctgggatgatgccatttttctacactaaaaacattagctcgtcttacagctaatataagctgaaaattagaggtgcctgggggagggaaatgaggcagatggattgtttacatgagtgctatagtttcactttttatgcaccagtcaccttggaaaaattaatgccctgtaagtttgccaatcagattgctccagtcatctctaaacattccatttggtttattagaataataaatactgtgcaaaaaaagttcatctggatccaggatattatactgtggtcagtggaagaaatatgtgctgcaccttacctctgactagatttggtcaggtgacacagtgagcttgacaaagggatacagatttaccctatttgggtgttgaatctgaggactagtcactggagttacagcctttagaaatctttgtcacctgtccagggctggtgctggtggcctcttcactggccatttctgtcatgcacctgaccatttgatgtctgctgagtggtctattaagaaaggattaaaggatctctcttcatccttccaggtggattcgggtgtctgtagtcacccagaaaagacttactggaaagtccattaaaggtgtcatctaatttgatgacgatgactctgaattaatttcagttggggaagcttccatttttatgtctggcttttaggtccttccatgatatgtcccttcttgtctcatcagactcattccagtggatccccaggaacagctctactgctctcagcgaaagaggcctgaagtcacactgcttggttgatctgtcgtgacatcctaatattttctctcaaactgttttctttcgtcctgtgtaaactttgctttttctctgaggcctatcctagtgtatttccaaggccccaggttaaatcccacctccttcccgagcctttcctattgtcttactcacttcaccaatctctcttgcccctaascttctacagttctgaaacccgatacaaaaagaaaaacttttggcacaggaagcgattgaatagaatcagataaatactaaagtcataaacataaaatctggatttattcatataagggatattaaagttaaagttaatatacataagtatatttcaagagcaaagctcatattttaacactttatttctggagtataggttccaggaaaaaggaataaaatctgtaatttttaaaaaggcaattacagaatgtcccctgcactaatcaaattaattgcagcattaaaacatggatggactttgaaaacatgctgagtgaaataaatcagacattgaaggataaatgttgtatgattccacttatatgggtatctggaataggcaaattcatagatacagaaagtagaatagaggtttccaggagcttggggaaggatgaatggggagctgttttttagtgagtacagaatttattgggaataagaaaacattttgagtagataatggtaatagttatgtaatgttatgaattaatttaatgtcactgaattatatactcataaatggttaaaattataagcattacgctacatattttaccacaattaaaaaagcaatggaacaaaaaattaaaaattaaaataaaattaattgcaccattatttgtaaagggaaaaaactccttcagtgtctaaaaatggaagaattaaactgtgacatgtgtagtatactatttatgctcaattgataatttaaaattaaatgattttgtatattaataagaatttttacataatgttaagcaattaaaaacaaaatataaaattattaaaatgtgtatatatggagcaagatgagaagggaacatgaaggagtgaaaagagtttttgctaagattgcgggattgagaaattctttaattgaaagatttctctcttaacagtattataaaactccaaagtttattatataaatatgttaggtttcatagtgttgttctctgtgattgtttttgacatcttaactcaattgtaaacttcatagaagtggagtccatgtcatttatttcttccataacccatgcttttaaaatggtagagaaccacaatagattattaatgtttttaattaatggatagatttattagttatggagaaagtaagtcaaactagagcataggaactgacattttttgaacgcttactaagtgccacacattatgctggatgtttagtatagttwttttaatttgaatattcataaaaccctgagagaaatgtattactaatcaccttctaatgatgrggtatctgagattcagaaacataagtgagctgtgtgagtgatatgattagtcaaatttgagaccaggtgagtaatcccagcactttgggaggccaaggtgggaggatgacttgaggccaggagtttgagaccagcctgggcaatatagtgagaccctgtcaccacgaacagtaaaacattagccaggcgtggtggtgttcacttatagtcccagctactcaagaggctgaggcgggaggatcgcttgagcctgcaaggttgaggttgtagtgagccatgattgcacatgccagtgcactccagcctgggagaccctgtctctatacacacacaccacacacacacacacacacacacaytctctctctctcacacacacacacacaatttgaaaccaagtttttattgtttttggttgatttttcttattccagaaacatatctctttaactagtaatatgttagtgtaaccgtggaacattgcgatggtttttgtgtcttaaaaaaacttaaagatgctgggttcatgactaataaaatggggtgtgtgtgtgtgcgtatgtaaggtatcaaacaatgaacactaatgaacactgcaccttttccaacattgccactcaaggacttcccacagactgcctgttatttgggggcaggtcatgaccatccccatgagatagtttactagagagcattattcttcctctctcacacattggtattaacttagacttttgtggtcttaaggaataaacacccactcaagccagctcagatgacaagaaagttactgcaaagaaagaagaatcttctagaatatcaagagcaggagccttcctgtgtaaaaattctggagcctctactgccggtggcctaagtagtcatttttcagaccagagtgacctgtccctagtcaaggttaactagactagaattaagcaactgagtcaagggcagaaactaaggggagaatttgccagtggcaggtgggcttgaaagaagctgctcagacatatttgtgagacatgtcagtgattgaggctctgcaaattcctgctgctgaagtccagcctccagtgccagcttccacaaagctctgccctgtcatggcccctgttcttgaacgaaatgcaaagcaagggaggatgatttaaaagctctcattgttcaattcccacctgtgagtgaggacacaggaaggggaacatcacacaccggggactgttgtggggtagggggaggggggagggatagcattaggagatatacctaatgctaaatgaggagttaatgggtgcagcataccaacatggcacatgtatacatatgtaacaaacctgcacgttgtgcacatgtaccctaaaacttaaagtataataataataaaataaaaataaataaacataaaaaaataaaagctcagagcacaaatagagtactcagaagtttttgctaggttatcatgtgtaatttaacaagatggcatttatcttttttttaagagactgaagaagaattagacaaggttagctgtgtaaagccagtggtaatctgccacatgtggttataaatggccataattttgtatgatcccaaagcaagatagatagcagattaagggtcagcacagatctgcaagttgagctcatggcactttatttccctccctagccccttttctagtgcttaggtrgcaggcaccagttaagcatggtgtcttgaccatgatactgtggaccaagcagcgatatggctatggctatatcactgttttgcctgagagtcatttattccttcattatatatttattgggcatctactccgggccaggcatgtgttgggcattgagaaagtggtgaaaaagacagaggtcctgtcctcaaggagctttcattccagtggaagaattcagataatacacaaaataacaaatatataagatattttcgagtggtgatatatttgaccagggaaataaaactaaggaaagtgataatgggggggtgtggagactggctgctataaaatgggtgagcagaggaggcctctatgaggaggacttgcattagctgagacctaagtcatgagaagcatccccatgggtcttgggaaaagtgaggaaaacatattcaaatagaaagaaatatctggtgcaaaggctctgggataggagtaagcttagagtatcccagaacaaaaagagggccagtgtggctgagagaccgtgtgtgtgtgtgtgtgtgtgtgtgtgtgtgtgtgtgtgtgtgtgtggagaggggaagacagcgggggtagagatagtaggggagtaattacctcacaagtttcatggctgacacctctataacaaaggagattaacaagagaaaagcatagcacatttatttaaccaaagttttacatgatgcaggagccttcagaaattaagatccagacccaaggaaagctgtattattatggttaggtttgatgaagcatggacagtcatgtagaagtatagttggacaaaaagcagatatgacctaatgatgataaactagggggatcttagcaaagcctgtttgtttagtttcttcttggcctctgtgtttaacattccatccctccgggtatagtcaagacacctgtctcatgagggtcttcaagagagaaggtcagagagacctttttgcttctgcagttttcttaacttccttcagcttaatactcagtgcgccaagcttccatatttgggggtagcrttttctgcactctatcatgctataagctgattttctcacatttagaggaacattcaacagctaacataaacaattacctgatgtcatatttgaagatatacttagataataaggtcttaaaaaacagtaagtacattaagtacattcacaacaattgttaatcttccattagttctgaaatgcctaatctaacctttgttttatctcagacttgggctagaatgctccttttaattcattctgcatgatttcatagaatcaattttttcttaaggtctcatatccttcaaagactttagggcaattggtcacgaagacccttgcacctcctcaaggctgtgtgctgtggatgttgcagcttaaggaagcattttgaaattgggcatctttcacagcctagtgtagaagttattggcccgcagtttttaccggctttctctttcagaaatcttcttttgttcctgccacaaggcaaaaacaggaaaagagatctgtgtgaaagaatgctctcccttttccttttgtggtgattgtgtatcttaagagaaggcctcaaaggttcccggagctgtctgtcttttcatgtaaatggagcccttaagcctatttagaagtgtgcgaaaagactgtgggagttgaggtgaaagatacagaagagtagcatcagcaccccgtttaatgtattcaagttcaactgtgcactctctctttcttgtatataattaaaaatactgcagaattgtattttgcacttgtacttttaattatatgctattcatattactatatacccatatagtgtgcagcgttgcaactacaaaaccatatattttgtattgggaggtttaagggattttccagggtaattttgaccgcgtaaaatttgccttacatgccaactctagaatacaatccccacgtaagatgtaaccctctatattaggtatttttaaatccctgcttatcccaaagtgagcagaactgggactcacattcaccccttgcccccaaaccagtaacaggtatagggttgtcactgaattttgtgagaagaaaagaggtgagacagaaggaacttgtgaggtttgacagaggagcaaggaaatctgtggcaggacacagtaggccggggacgctgggtcaggcagggaagggggctgagagagagttcctgggtgagactgtttgtactagtaaatgcagggctcaaagccatactagccatggggttggtagagtttgtaaataggagtaactcctactggatggataatagccatttttccctagagtaccttcaccttacaggaaagtttactgtgcattgttccatgtgaatgttgcagcatgtgtgtgtgtgcacacacgtgtatttgtgatgttgtagacagagtaggaggaaagagtagcagtgtggaaagaggagaaggcatgaggatttagcatccaaggtttaagaacaaggtctgccttttgttgttttgtggctggggcagtatcattaaatggctgaggggacctgagatattggcatgagagagggaaggtcacccttgtagcccctgtcacctgctaccttgggaggcattcccttcccctcttctcacccaccctaccactccaaggcagagtttgtttaatcagatgcagaaaatgttctgatttggtagtaaagaaaggtaaacaacacatccccatgccccacttaaggtttttamcaggtgcagttgaaatttatattcatggatgtgggattttcacctgccccctgacccagtttgtttaggaggttaatagaattccaagtcgcatctccctgggttggaattttctctacaactcttggtagtgatggggttcaggacacactaccccacaatatgaagcctggcatttgtgaaaattgcagaagcaggaaggtcattctcttactttccccctgcccttctctcctgaagctaaggagtgtccttatctctgaagacacacggactcagagaggagtttgaacaaacaggccttgctaaattccctcttgtttattgccattaaattatatcccctttttccaatcatacttctctacgactatccatctcttcatcaaacctaagtaaaaatacttaagtttacttgtttctttggatcttgatttctgaagcctcctgtgtcatataaaatttataaataaatttgtcatgcttttctcttggtaatgtggcttttattatagaggctcagccatgaaaaaataaatcgtttcctctcccacagtagctgttcgtcttttgagcaagtcttttagcctcagtttcctcctttgcatcagagatgatactgaccaccctgatgctctgtgagggctgaaaggaacaggatacctgcaagcattttcccacaacttatgcagatgacctgtgaacaaactgctaaccagcaagagtgtttgaatacaaaaaattctaatgcttaatacaacattttactcaagactctgttacatatgacaaaaactcagttctaagaagcttatgtaaaaagcagaatttcttgttttatagaagccagggaagacctgaggagtgaaaagggaaatcaccacatataagggatgaggcaggtgagtgctcccaggacagacagtcccaatgatgttagcaacatattggaacaaaaaattaaacaaggtcttagaacttaaatctgattttataataatattcattrtcaatacttaattctaattttacatttttagatttatgtaattaacattagttacctatacagtaaagataaatatgtttcataatgctttttttctgacattagttcttgtttgaacacacaaagctacacttttctataagtaaaaatgaatatgtcagactttcaattcggaaacttgagtcaaatcagcagtctctgggaagaggaaagttgtaaggcctatgttctttcataatggcctagcccttccccctcatctgacattttcttgtggaaaacatctggtttaaataagcactaatggcaaacttgatcatcagaaactagaatgcagaaatcacaaacaatgtatagtaggttaaagggatgccaaaaagcagtatgcaaagagaagtcaacagcaaatttattttatatataaatttcaccattttggtgcttgtcttctaactgccttacacttttctcttctgggaacggccaaggcccccaaaacacaaaagtgaactatgatcccactttgctagactcttgagatggctctgtaaacataccctctaatctatggtccttccttcctacttcctcagaattcactgaaaacaatagagctctaggaactcctattgcttaaaacaggggtgaggatcgtgtttattcaggactatggctgttaaattagcaggactgttttgactagctggtactcaggggtagggttgtcatgttggtcaacatgcctatcccatttgggactactctaaaggaaataggaatgcctaaaaagtttctagacttctaagaattctatgactggggttagggatgacttataggcaggaacggagccagactcctgacggtatccaaggtttataggcttggtgatagaatttaccagagtagaagagaaagttttckgagtagctagtgttttgaatggcatggggtttgtgacaagatttggggtaarccagtgagagatgctttggagttatctgggacctcatttattctggtggaatgccagaagtacaggaggcatctcctagggtatttagttttttagaggctaggaaaggtagtaaaggtaaagtagatacaaatttgttactatgacttttatggagccttgagatagttatacgaagtaggaggttgagcagggattattttaatcggagaagagattagtagaaactcatttaggaggattagagcrtgctgaatgagatgtcagaagcttttaggatccaagaaaagtggatggcagagagagagaggggtcagcactgtgtttaatttccttctttaccgtttctcgtctgcctttcctggatattacctatttcaaactaaagggaaatgtgtggaggctgcatcgggtagcagaaaaacatggaatagggaactctgcctctgaaatagcatataatacttcccacagggtttaatgtgaaataagtggtataatctaggtcaagtggcttaggtagaatactgatcaagtgaccagatgtcttggaatgagtaggataatcttagattttggcttcctatcctgtatccaattcactttaccattagggcttactattaccttgatgtctggagtgaatagacccttatcaacttacgataaacatttatcagtagttcagacagaattcttaaactggattcagaactagaattataatagcagagttactgtatgtttcaaacagtgatttggccttagtaaagtttggtctcttaagatttattactcatttatggctaagtatatcacaaataaatgttaggtcccctagtgagtattcagcaatcatttccttgggatctaaggcataccaggtgctatgttcaaaatgaatgggacatggttcttgtttttaagatgctcccagaccagtggggcagactggtataaaaataactaactgtcggccaggcgcggtggctcacacctgtaatcctagcactttgggaggctgaggcaggtggaacacctgaggtcaggagttcaagaccagcctggccaatatggtaaaaccccatttctactaataaaatacaaaaattagctgggcgtggtggcatgtgcctgtaatcccagctgctcgggaggctgaggcaggagaatcacttgaacccaggaggcggaggttgcaatgagctgagatcacataccactgcactcctgcctgggcaacagagtgagactctgtcttaaaaaataaaaaataaaaataacataactaactgtataatataataatatgataaatgctattctgttggtatgaatcaagtagcacagaggaagaaaacaattcactctagtagatggttggcattttgagagagatataaatataattgtgctcatttataacatgaattataaatgtagcagcattggaaatggacatttaataaggtgtagcactactaaattggattaartgcatgcactgggtttatagatggatgttcccatcaaatttgttctttatttgtatccctacccctgagcagtccttgcctggcaagtgattggtgtttgcactgttgggggtaggctttaggttcctgtttgggcaccaggagctgtagggttagaagaagtaatgtctttttctcacctattgcaaggttcattactgaaccctatagcaaaggcagagtaacaagcaaaaagcataacaaatttatttaacagagttttatgtgacactgaagcccttagaaatgacccaaagacccagggaaaactgtgtatttatatggatagtcatacagaagtatgattggagcaccacagagtatcatctaatggtaatcaactagggagaactttgcaagccctgtttgttcgaatggcttccaagtatagggtaggacccctctggaatgaagatcttaaggcctacttttagggaagataggtcagaaaattattttatggcctgcttcagagggaaaggcaagagaaggtcagagagtgaccttcctgtttctgtggttttccaatgtcctttagcttaaaatgcttggtatgccagggtgccatatttgggggtatcctgttctaagccccaacatttccctggaagggcgatggctttttgatctaagcaaagttatcagagggaatgaggtacaaatcaatagaggacagactatgagatcaaattctgactctactacttaagagctgagtgtcttttgacaaattacatgtattcctggtgactctgatatctctataaaatagggatgatagtagtaccaaccttacaaggctgtgcctcaaatgtgtaataaatatgaaaacactttgtaaagtgctgtaaaaatatataaacattattgttttatcacaaatatcagcacaccaattatttatgtagttctatacattacgcaaaaagttacagagatgtggggctcatcttctaggaaaacagaatcagaattctgaatcagctctaaagtcggagaccaaacctygagctctctctaggtgctgtttctcctgaaaagttgacttgtaagtctaacccagtgcattgcctctgatggcctggtgttcttcagataggtaaaaagcaactcgaaaaggggaagagtattgtgctttccgcaaagacgatacttttttgctctttggaaattcttgctcttttggttttgagctctgaaggtgaacaatccagctgattcaaatccccagagtagccctaataataggaaaaccgtgacaaccgcagatattaaaaacatacctcaatttgcacaactggggtaagacaaatacatatggtattatatgaaaaaaattcctttatgcaaatctagaaacttactttaatgtcatttcatttaacatcaaagagatgatgtcaaagagaacatgtttaccactgggagagtcaaatgaaagaattagtcttctagaattctttcaaatgaaagaatttgtgtgtaaggtttgattggttatttggcaaacactaatattaataaaaagaccagtacttctagatatgggccactttgtagagggattatgccagaactcccatagtatgtatagagacccttgaaggagggtcctcaaacccataagggaatttattttaaaaatattttgcttatgggcccataacttcattttatgtctctctagctcacaatagaggattataatctattgggctgatatatctgagttaacatcagattaatcgtatcactttgtgtatgaatatcatataaaaatgttagtggctgctgttttcaccatgctctgtcataattaaacaatttatttcatgctgaagcttccctgtcctgattctgggattgtcagttttatggttctcattttacacagataaaaccaaacttttcagatgtcaaataatgtgctgcagacttccatgcagttctcagctgcagttataaatcactgttgttttaagtaagtgacctaaatgccatttttattaggaatagagtggctaggagagactaacataaagcctctgatggagttctaacatttctccttgagcagcaggaagagaattgcatttcctgctggctagagaagccaggtcaattttgtcctaccattctgggaactatcacttcagacacctaacatatccaggtcctgcttatttttcttgaatgagctattaaaatgcatgtatgtgtgcacatacacacatacatacacatcatgcagccatttgcctctgtgtrtacatacatatcattgtgtagattgcactttttcagaaaagacaactgatcaccagcacgtcactctcacttcctcccatgtacattttgtatcttccccacagggaagtgaaactggtggtgggttggaagagattgagtttgctgaagtggattctgccaagtggctgtttgtggatgacctttgtcttatagggggtaatagtgggagttacggattcctggcaaaatgtctgttcacatctcatcacaattagaatcataaactatgggctttgtggatttgttcacctgagatagtgatgaactaggaatcaaaagatctgggttttagctctatctctaaatatctacatatatgtgaagatagctgtgtataccactgtggatattttccctcttttgtcttatcttctccatgagactttcaaatcctcaaaggcacagagcatctttaatttacacagcattcactttttcatctttgtttgttcctagactgcatttagtagagatgtaataagtacttactgactgatagaatgagaccacatcctgccttagatgaactggaattccatttgaaagtgtttccaaccagaaatattctgctttggtgccactgctactgttcagattcaactatagcagccacagtgtgatcagacaccttctcccctcaggcgccacccttggccaccctgagaagatgggcccccctgccagcatgtctttggggcccagtgtttctgtctctctgcttctcccaacactcagtggcctgaagaagaagagctttggtatataatttcttttttccccccagccaagaggaattgagcactcatgaatattttaagcgtgttacaaagaacacaaaagctgtgccttcatgggaggattaaatgttggtgtttgactcctcacaatcagcacattttaaaacataaaccagatcatgtcagtctcctgcttcagagccaccagtggtctcccacactcttgcaaccaaacccaaggctgggtgccagcctccaaggcactgcctgactcagccctgcccactgctctgaccacctcttgcagtaattccagccatgctgatctactctgggttcccagggcatcgtaagcatctttctctttaggacctttctacacatctcccctgcctgggaccctgccctgaaccctrtgctaccgcaggatcgtcactcagatctcagcctgaatgtcctgtctcagacaggactcccctgactgtcctatcagtrtctacacccgatattttatttcctcacatcactcatcatatctgaaattgcctgctcatttcctggttttcttgtttactgttggaccctgactagggggtctcactctacaagggcagaaagaggttgtcttagtctggttctctgttgttacccagaagctggaacaacgcctgttccccagyggttgctcagtaaacacatgtggactcaatgagggattgaattggaagttatttacctctctcctggcttttgcttccctctcttcctttgtctctcttttgcggaatctgtaccatgaaaagggctgttgtccagtagtggaacacaggccttggattgaggtcctggttgactcacttgatctgaagcttctggtcatgcacaactgccaattggaaacagctactatagaaccaccctctttttccaaagggtcaacaaggaaatcaaaaatagaaatacatttcaggtagtcatgtaatactttactaatactaaccctaagaataactttgcgataactttgcaaccttaacttccattagtctcactaggcagttctgcttcttcaattcctttagtttgttacatgccctgcgatccagcccaaaacaggagaagccctgtagaatatatgttgctatatcctcagatatggccaataaaatttgtttgtgacctgtaaggagcagatggttcactgaaggccattcatagaggaggcaaagcaccaaaattcagtgtctagccttaatttttccttattagagagtctggaatagagggatacattttcaggatctttcctaatagaggagttctttttttatttggatgaagagattatttctgtaatttcccacagtcttaggctgaactctccaagtaatgaacttttactcagaatagtctaggctttgtgtactcatggaaagtgtaatatagcttgccttgttggtttttctggagatagcacatttgggtcacaggggttcagccagtcttcggctgttatgcagtgtaattttatgggaatagttttataatgttaacatctgtagactgagagcttgatgaagacatcacccagattgcctgggaaacgccactgactttgggagctaattcttgataggtaaaatatttagctctctctctgtctcttttttttctttgcctagatacagctaccaaccttaccatttccatcttttatggcagatgagctatgtgtgtatttttttttatctccttgcagtatgcatttttgcaagttaggggataaagcccaggcccttggctttttaacttttctgcttccttgatatttgtacatgagataagatgttaaaggatttctctttacagatttctgttgaagagttatagaattgactgaatattcatatgtgtactgtcctctgcttcattaactctatgttcatatttctttttcccatgaagcctctgtcgcccattttgtttaaaattgcaacctattcccacaccttaagctaaatctcccttaccctagtttgtttcccatagtaatgatcactttctaacatactgtatcatttgtcatttattacgtttattgtctgcctcccaccactagaatgtaaactacagggaaggatttctatctgttttattcacattgtatcccaagtgcctacagcagtgcttggtgcatagtaaggctttgataaatatttattaaatgaatgcactgacatcctagtgaaaagacagatactgtagtgtagtgatgaaaagcttgggctttggagtaaaacaagcctgggtttgaatcccagctttgctgcttaccagctgtgtgtctttagaaagtgatttaacctctctgagactcatttttctcatctataaaatgaatattatagcaccttgaaagtgtgttgtgaagataaaaaaaaaagataaataggcaatacagcatggtaggtaagaaacaaggctttatcgtccaatggatatgggttctgggctttagcttccagttatggctctcccattaccttatacaatttttagaagccctctaagctcattttctttacctgtcaaatgggtataaaatactatggcctgcctcacaggagagtggccaggattaaaggaggtaatctctgcgtagtgcttagcagactgatcaactcgtaacaagggactaattaattgaagatgacgatgatgataatgtttgaaaggtgcttagctttattgctcacacatcatagtaattgctcaataaatggtggccttgacaataaatgaaggacaactttattagaactctgggagcctcccaaatttgccattttctttttgttctcctttctccagggggaagtaaggcaaatgcatgaagttatctttgtgagatacttgtttcaactcgaaaatgaaacagcaagcaatttttgtgtgccacactttttgccctgtcaccaacagttctgttatgatttcagaacttaatttctaatttttggatgcagttgcacagaggcatttcttcaccacgtgatcactgtgggggcttaatataactcaggcatttgctcagctggtttggagctaatggaattggctgtagtggctgtasttaggggagattataatgtctcaagggtttcattggcttccacttccttctgcagacttatagtaaaagacaagagatgcctcttcctggctctatttctcatttgctgtgtgactctcagcaagacacttcgctgccgctgagaaccacacccactaagtggacgacccagttatgaatccttgctccattctgctgtatgaccctgaccaaattattcaatgttgccatatcttattttccatctttgtaaataaataaatgtatatgacaaatagaatgatcctataccttagggctttgtgaagattaaatgagatactacatgtaaagagcactttggaagtactcaataatacttattattatgttttctgtataaaaaattgaaatgttctattaccatggtattttgtttataaacactttatatatatatatatatatatatatatatattttttttttttttttttttttttttttttttttttttgagatggagtctctctctgtcacccaggctatagtgcagtggcgtgatctcggctcactgcaggctctgcccccgggttcacaccattctcctgcctcagcctccccagtagctgggactacaggtgcccaccaccttgcctggctaattttttgtatttttagtagagatggggtttcaccgtgttagccaggatggtctcgatctcttgacctggtgatccgcctgcctcggcctcccaaagtgctgggattacaggcgtgagccactgcgcctggcccaacactttctatattttaaaagttctagaacttcggcttctgcccatgatgtcctgtggggtcctgaaagcaactgttgaagaatatctttgcttgaaaagagccacgagtgaccactgtgtcttcctacaagtggtcagacacaattgtctcttgattatttagtgtaatgtaggggaataactgagattaactggtggttatgattttgcttaaggcagtgtgatgaggacactaaggttagggcagctcctgagcaggaggaggctgctatccagagtcaggaagtctcccaaggtgttttttgcctggtgatcagcttttggccaaaagcctattactctcaggtgaacctggccctgttcttggtcccaaagctcccggaccaggctgagctataaaaatagaatgccaaattattgatcctacagtgtaaaattaagctgttctatccactggataggcttgcctaagttcccctttaaggcaaattaagtgacaaatcaaattattggacagttgcttggtaagtacagaattgatgtgaggggagttaagtgattcaaatgcttatattatcaggccccgttagcctgctgttccacctctacagtgcagatctatctgtcaggtgaccacttgagtgggcacacagggcttcctggcaaccctgattaggttcggaacaagcacttccatcatttttcttttttttcttagagatgtgctctcactctgtcatacagagctggagtatagtggtgcaattatagctcactgcagcctcgaactcctgggctcaagcgatcctctcccatcagcatcctgagtagttgggattacaggtgtgagcctccatgccaggctatactttatataaaattttttagctgacagacttcctccccatatcctgttctacatattattttttatttaaattctatttttcatcagagtaaaacatgtataatgttttacaaatctagtaatagtatagatttgtactgaaaaccagtttcttgccccaatttccccactctcctttgcttcttatgcttcgggagcagccactttcaaatctcttgttgattctactagtgacccccacatttctaactgatatgcttgaattgctgtttcttaatttttctattttagacattatctcatgttttctatggacratgaccatagggtacttrcaccattctctccttccatttcactcttccccttcttttttccggtatgattatatcataatattcagttaatatttacattactgtgacaatgtaagcattcatggcagagctacaaaatgtaccatgattacatttactttcttccttcctttcttgtttgcattttaaaatttatctctggaacacacatttctctacccacatctcctatctttaaatcgataagggcatatgaaaccataatgccttgcctttactacacctaacaaaattaacaattcattaatatcatccaatacccagcccaaaatcagatttccctgattgtctcaaagatatccttttacagttgattagtttaaataaggacctaaataaggtccataaattgcatttggttgttatatccttttactttcttttattctggagtacttcccagaataaaataataaatgtcacaaataatgtcacaaataattaataattatgtcagaaataattacttccttactctccttttatttgtgacattaattatttggagaaattggatatcaaatgccctatattctagatttggctgatggcttcttcaccacgtccttttaacttgttctgctagrtcttatatttcccataaactggtggttgctgctaaggtttgattagattagggtttagagggttttgttttgttttttctttttaggcaaaaacactctataggtggtgctagtacttcctattttatcatgtcacaaggcaataatgtctgactatatcacctttaatggtgattaagttgatcagtggttcgggatagtggcagcctgatcttcttcccatgaccaagatttctgtcaacttttcacctactggttttagcacccattgatgatcattgcctagatccattgtttaatgagacatatattctgtcctttcattctgcagttctgtcctgtgccagtgagtgctgattattatgcagtttaactccagaaggccatcttattttcctcatttccaagtctgtgttagagtcagggagtttctctgtgaccctcatgtgctacctgagaactgactaaatttatatgaaagtaacattcttatagttgtattgattaaaatttttatttgaacctctagttgagctttgctgttggctttgaaaacataatggaaaagtggaaagcattcttgtcagtcatgttgaaaagtaactggcagaaaaagtggacttaaaaaaaaaaagtagtggaacaaataaggggactctgctttggtttataatgcctcctttctctagggtaggaaaattttgaagtccagtggggtctctcctgcctgcgagggaattggcgagaagctatcaggatacgcatggatgacacacagtcacacagtcatttgaggactttttggttgctgttttgttttagtttttacccccttagagaagtctttcataaaaatttttcctaaaccctgttgcatgcaaattagggcttttcctttcctctgtaatggggcctgatattctttgatgtgttgtagcagaatttagcttctaaatacagtttgaaactagctctccacacacacacacacacacacacacacacacacacacacacacacacccttgaattctcagctgacatgttatttctatttttttgtccttactgcaagaacctgtcctgtaggaaccaagttcagtggtaggaggagattatgtagacatcttgcttctacttcctgtaaagttggatcatgcagacatgagatgcaggtgaacaggagaaggaagtcctctccagtgtctcccagctgggagcctgttttcatgcttttcaaagagctccttttttgagacagatgaatccctggtataaatacctgtgctgttattatagaaagagacagattggtcaccttgttaatgacttccagtattccagagttcctcctctgaaatactctgcagatccaaattatcataatataggggcctcttctgccatttagaatgaccttccacataactctcaatgtccaaattgggcccttccttcaaggcccagatcaaatgactcctcccctgagtctcccattgagaagtcataccttcccatctcctagcttcccatccatcctcttttcatggattacttgctacatttcattttagctcatttgcgtactcattttactttttttttaaacagaaaaatatcagtcttatctttgttttaaccacgatttgtatttaataagtattttcataacatttttaattttaataattaattacttgagtaattttgttttctgagatattcagcttttatttcaactatgcttccagtatctacaggggagtctgtcrgtcacatgttgagccaggttttctatttcagaagaggaaggaaaagaatgtgtaggggaattagtayggaactggagtgagaagaactagattcaaaacccgtccccaccacttcagagcaactgctttagtgcaattggtatgtcarcaggggccttccctcaaaaatacacagctctgtagcaaaagtcatctgtaagacatatttaagacttagttcatcagaaagagggtagggaagaaaggactgtgtagatttatgagcagtggtggatggcacagggatggggtcttgggccctcaaagccctccgaggtagtactggctactgggaaaaggatgtcggggagcaggtcccacttttagctgcacttgaaaagatgagtgtacaaagcttatggagtactcaggacggagagaacatggtgagtgttagggaaggaagccttaaatataaactttactctttaacctccttgcaatctcactctgaacctccttagtcccaggtatgggtttctctcacttcttacttccatagtcctctcttggaagctctttggctgaattaatgaaggggaccactactcataaaccataaccagcacttacgaggagcctcacattagtaatggacgacaaccctcagagacagccataggtcctaatgctattattaatagtcaaacctgtgtagagaaaaaggagaagccaagatccagttccacgggacataacaattcacaagcagctcatccttatttcagaaagccagtaagacctagctttctcatggaggttattctttcaccgtcagtctgcctctttttctgggaggtgccctccccttcaggatcaaggaatgtaaagaccatgagatatggagtcagacttgggtttaggcccatttatatgctgtaaactttaggcaagtcactttttctctctgatacggaaagagatataatatataccttattgatgttgataaagatgttcagatgaaattttatattcatataaatgtgtatattatatatatggcccgttcattattttaaagcaatgtaaataattcttatctattaccatagtatttcaaaggctacatcttgycacaggtgagaatcagaggtatgttctgggggttttttttgtttgtttttgagacagagtctcgctttgtcatccaggctggagtgtagtggcataatcttggctcactgcaacctccgtctcccaggttcaagcaattctctcatgtgcctcagcctaccaaatagctgggactataggcgcgtgccaccatgcctggctaatttttgtatttttggtagagacagggttttgccatgttggccaggctggtcttgaactcctggactaaaatgatctgcccgtcttggcctcccaaaatgttgggattacaggcgtgagccactgcgaccagccagaggcgtgctgtgttctattggctcttttgcctaccagtgccagaaatttcctacacttcttggcatcttgcttttctctcctatgaaataggcaatactagttgccctagagaagaaatttatctagagaaaaaaatgtacaaggtagacacagctggtgagttacccttatactatttccagtactaccaatttcatttcttccagaaggatttagaatgccacatagtagttttcctggtgccatgcttgaaatggtgaatctatttgaaagaagggattttgtagtcacattgatgttgctgcttgctgcaagccaggcaagtcacttaatatctttatccttaaaagaggaataatgtcacctacctcatggtgttacgatgaggatgaaaggaggtctgtaactaaggcactgaacatggtgtttgatactcactgggtacccagtaaatgttagttttctttgtctagactatgtagtgctcttcagttttcaccctgatcaaattgcatttgttaaaaattccaagtaagacatggcactgggtactttaaataaaggggtgctaagggaaggtcagcatgcggtagagggctgaaagagccagttacatttgtttgtttgtttgttttgttttgtaataaacaacagtggcttctcatctcctttccctggtcctgagcctgctgagtcactgttccagcccttgggccacatgatctcaggctgtgtctatggaatacagcaaaacccacaagaaaccagcactaatagatggcaggtcattttgagggatttttctttgcgttcctgtgcttgctstcctggtgagataggaaacctttaataagacttttcctaaatgatgttgcatgtgaaatgcagatttttttttttctgttctcctaacaaatgaccatttcatgaggtttcttttcattttttcttctttcctgcttctcagtacattccacaaagagcttattcctctgctggttactgattgatggttctactctgtatgccctttaattttgcaataaaccaacaaggagttgagaccacaaacttaaagagaattgacttatttgactggattcactggagccaacaggcagatttagtcatttcagtgtggtgctagggagggcaggaggagtccatgagaaggaacaccgtgttgtcaataaccagacagaaaaaagcttgcttgtcctctcattccaaagcatgtgggcatctgttctcggcagtgatgcctttccaggccttgatgraggcaggacggcttccatgagatttgctcagaactccaggattctgaattcagtgggactttaggtatgtaggattggtagtcagtgtttccagcttctgtgtcccttttttcaaagggatcatggtataccttgaaggactgcaggaacagccataaaccctcctcagttaccagtcgttaaacagcctggcctcttggctagatgacttcaaagaccaaagacaaacccctggccctatcacctctatcctagctgagtctttaacataaggccaggacctctgtcaggttatagaggtactaatatacttcatgcgctggttcccaaatatattaagaattaattattttttttcttatttagcactaccattgtacagagcaacccatccgaaaaataaatacaaatatcatttcaaataggaaaaacaagaaaatatttcttaaactaaagacctttagttttagaggtatgcatttgaaaacacagatactatcatcacgtatatttaagactggttccagacccatgctgctctctgtgcgttgaaatgaaactgagaagacaaatgcccaaatggaatttttcccacctgtgaactcctattccagatcccagtgttgtttgtggctcttccacatttaaccagctaactgcctgctcttattctgttcttatgtgacaaccaatcttctgaaactctcgtcatcacatttcagcagaagtgaaaatattagcagagtggttggtggccaagacagaaatagaacscaggagtctgtgtcctttcccttgccggacctactggagcatggttcctcctgcctgaagactcagtgtttccaactctaacaaacagaattctaacagttgactggtttcttcttgctactcaaaatttgttttatacttaaacattttgtacagttttttctttatgaatgattttgcattaaacaaatgggacttggttaatctgatatcagtgaatgccttattctgaggaaattaatccacaaatatccgtgggaccatgagttttcatattgagaacctttttatgtgatagactagagagccaggtagaccaggtctgcgtctggtgctcccatgtgccagctatttgatctcaaaaaatacctcaacttcttgaacctcagtttcctcatctttacaaccaggatgataacgtttacctcactgagttgtgaggataaaataagccaacacaactcaagcaattggtaggggtctgacacataggaaatgcttagtgaacgtgagtttcctctcttcctccttcactcctttagaatagggttagagatgtagaaacacataaaatctcatgaaatgtgcaccatagagagagaaggataacacaaatgacataaaaagtcttgtactaagttacttggtattgattctaaagtcagggtattatctagggcaaggtggctcacacctgtaaacccagcactttgggaggccaaggcaggaggatcacttgacccttggagtttgagaccagcctgggctgggaacatagggaaactccgtctctacaaaaaataaaacattggccgggtgtggtggtgcatgcctctgttcccagctcctcttgtgtctgaggtgggaggaacgcttgagctcaggagttcaaggctgcagtgagccgtgattgcactactgcagtttagtctggatggcagagcaagagcctgtctcaaaaaaaaatgaaaaaaaaaatagaagaaaaagaagtaaagtatgagtattaagaagtgagagaaaagttagggctagaatagttagcaaagatwtcatggaaaaggtaggatttgaactggcccctcaaagatggaamcttacagagtaaaggaggctatttcagactggggcatttggggtgggtaaaccatgagaaatagagaaattagaacgagaatgttataagccttggttttcctattggaataattgaacgcaatagaataataagtaaaaggataatattaatatgtgttaggcactgtcttaagtgctttatatgctaactcatttatccttaaataggtaagattgctatgccaattatacagttgaagaaagtgaggcacagagacattaactaatctacctgagtaggtgtggaataaataatctacaactagtaggcagtggagctgagctggaagcccaggggatctgactccagagtccaccctcctaacccaggacagctgcttcagtcacttcccagctcccctcactctgcattgaggatcagctaagaccattctgtgaacataccctgaaaagtataaagtaccatatacgtgtaaaatgacatggttattcttattaatgatgtcatatgagaggcgacaaatagctacctgaaaatgagggagaaaaactatggtctagcacccacatgcagttgtactgggcaggtttagccagtgcacagcatatatgcctcaccttcctctctagcgactcttgagtcctgaaagcctcacgtttcccatttggacagtgttccaggaggccatttccaagccagtatcagagactaaaaacctgtttggcatctggcagtagggcttgtgcctcaagtgtgatctgcctttggccaggacatccttttttttttttttttcttttgagatggagttttgctcttgttgcctaggctggagtgcaatggcrtgaccttagctcactgtaacctccacctcctgggttcaagcgattctcctgcctcagcctccccagtagctgggattacaggcacgcaccacaacgcctgactaattttttgtagttttagtagagacagggtttcaccatgttggccaggctggtcttgaactcctgatctcaggtggtccacctgcctcggcctcccaaaatgctgggattacaggcatgagccaccatgcccagcctcaggacatcctttttaacgggcttgtaccacatgattgggagtttgaatgttagtaaccatgatagaagatctccactccaagggcatcaccgtgggakgaagcctgcccctacttaccatgtaaatatttagccatttcaatatatttgttctggacytgttcttcttatgtgtgtctcctgtgttgagtctgtttaattgtaggttattattgtgtgtctatattgatgtcatttctttaagtacagacacagacagcattgcttcagctgcccccacccctccttttaaaaataacaccttacacaatatcccttccttgaggacatcaaataaataacttttgttcaagagcatatctgatgaggtggctaacttggaaatttgttcctargcagaccttgtgacctctgtttcaatacatagtgagtggcctttgctcccattttatgctacagattcactctggagatagaattggttgcacctctccaggcagtgagtttggagagcccttggtggttaggatgccatttgtgctggtggcacagaaatacaagcagtaagcccagagttgcttactctccactggaggtttctcagaggctgggggggacccgagactcctctgcttcaactccgctctactatatgccactggaagtgtagctgaggctgaagggtatcaatgttggtatttatcaggttggactcccccaagtgccctattttcatacctccaaggagcaagtgattcaacagaactgttttcttggcctcaaatgagtctaagaaggggaaatcacttaataccagccgtctgtgagggaccgatcacaaagctgtgtctttctmatcctccttgtaaatcaaagggaggggaatccccagagcccaggagtacacatgaatagaaagcaccacargtaataaaaacacctaaaaaggtcagcagaaactcggggagctgctggaaattcacctcctctgcctttctatgggactcagtgggcagtgatcaggtagcaggcaaggatacccaactacacaccaaagcaacttggccacaggacacgtacagtgcagcagaaggctggtaggatagtttcttccacatccatgtgaacctcagagtcatctgaccattggccttgttctcttccaggttctagctggccagagacttttttggcctcatactaactgcaaaattgcacacagttggcgaatacaccactggaagccactgtggctgcattgtcacagttcaccaattgtgcatgttatttcctgcagtgggcccaagatcactgacaggatgccgtcggggttgggctgaaggtggaaacagcacactagcttgctgtttgtggcctctttacaactgccggccccatctgagatccggaaccaacacgtgctaacctcagcccattggggccagtggggcagccrgcagtggaaccatagctctccacacctatgtctatggcacggtagctgccggcccacagtttccactgcatccccttgcatgtgcaccccaagagaagtaggccaaagagaaagctgccttagggagccacatggttatcttgtgtgtttacttttgccaaatggcagacacaattctacttcaatgcatttttctgaactcagtggtcaaaagtagcacggaagcactacttgcgtcagccccctctgtgattgagcgagtgtgtgcttgtgcaaagctgaggagattttttttcacctcctccttctgcattccctcagactgagccactctcttctttaggggctcccctactaggcagagtgtttctctagctttgcctgtggatttcacagtgaaatctacagaagacagttttcctcagggctgataataagaggtatgaacttattaagattggaagcattctcaccataaacacaaattatttcaagttgctccttcatccccttttccttggccactgccattggttctgtgtaggatggatttcttaaggttgaagataagcaatgcaaaggtggaattttgagtacagcactcatcctaatgtgggtgaaatatatgaaacatttattctaagcagactgctacattaacagttgttatacattcattctctgcatatcttttgtggactcaacacttttaggtacagagaggttaggagaatttcccagaattgcacagcaggttagtgacagtgccagaaataaaagtctgcctgactcccacacccatgttttcttcaagccaaattgaagtttggcctcttctccacaaatatttcacaagaaaaattccccacagcctttcagaatttcccagaaaacaattgttgtgcagtccttcaagatggaaatggcaggctggaatattgaaaccttatcagcttttattctagaactgacagttgatattttctgagctgaagctaagataaaagtttatttttgtgttttttttttttaatcgtggaatgatttttgattttccagagcatggcaaaactaagccagcaaatactaaaaccacatttgtttttgtgacgctcaaactccgtaacaaatattgggtatctctatacaaagctggatgtggacaggaagggtttgggatggggagaggcatgcgtctgggagcgtggcctttctggacctaccctgttctcactctcttccttctgcctcttgccctcattgctttccttattctctttcttcctcttgtctccttctcacctccagctcctaycacagcagacaggttggggcagacaccgtcatggttggggagcaggaggacagcatggggaaaaccactccaggcctttctctcaaaccttagtgatgaaaggactcaatggacctgaacaatttctcacaggaaagttccggtctctgtctccttaaaagcaaggcattcagtaacccttaacagagccaggattaaaacttgaatttctgacttatcccaggcctctgtttggatagaaaggctaggtcactgtcatatatggcaattaggatcacttcagatacaaaagtaacatttttaaagctgtgccttaagcagagagaccatttttagtacaaaaaggaaaaaaagattaactgtgccttcagagctgatgaaaggcagagcctcgtcactttgaaagcattggatttagtgccaggcgggttggtgagtagactcagcacccacattctcttcttgcgtctctctctggccacccagattatccaggggctgctgtttacttgagagctagaagtatcaggacggactatcactgcacctcgccatcctggcccagttaaagtgattttgaaacttcctgatgtgtgttagattgtggcaggtttctgccagggagtgggcgggaggaggaagcaggtgtttttatgggctagaaatgcccctgagatgcctgaggttgcttcgtgaatcctctagcccagcctaccccttcaactctgttgcacagagacatgagttccatgaaaaatttagtttcaaaacttcccgtgggcgccggaaatgataaccacatgttatcaagagccactgaaaaccaccaaaaatttgtcaaaattcatataagattgcctcacatacttgactttcatagaagcggaagccattgacctacttgatttatggtatttattagcagagtctgaaaagacttttatcacaagattgatcttgttacagtgtagcatcttgaccatctttcagtgtatttctggatattagatttatttgtttattacttttataggtggaattctctagaccatgacattaaggcctggagaagtcacctgtcagtagatctgagctgagagtttctctctcttctcctgtgtcccatgttgccttaggaaggagagcaggcagggaagcctgcatgcccttatctcatctgtactattggtcttaggtgactccagttcacttggtggaaaatggggattacaaaatttgcctctcagctgcccccacagaaatctcagtgatggygtttgtcagattcttgggtccttaaaaaatctgacttttaaatatcgaataattattttgctgatcatgaatatctcttctgctgaccaaacaggaccagatatcacattccaacctattctatccctggctgaccacaaactccctcttctttgtcccccaccaaaagtcaggtaaaatgagctgtttctatcaaaggctgtgtcttcaggcctggccatttcccactcaggtctccagkgctatccaattttctcttcacctgtacattctagtactcatggaaggctccagtatacaaaatggctactcatggggccccctccccttccaccccaccaaagatatttctaaccttcaatgtagagtaagttagaattgacatatacattgtcccttaaaggccaggaacattaagcttgagcagagggtaggtgtagcctgggtatagtctagtcatagcctagctaaagaaagatgagtcagctgaaggcagagggtctgcattgggcacatagactggcagagagttgggctcagttggctyaatcctctgactaatgaccagttaattctgcttattctctcttaactcaaggtatttgctgccttaagctactttttaaatacttagtggaaataagtcatctattttcattagtgtgtgtgttgtgtgtgtgttggttggattttcctggccaggagcctctgccttctgaccaaaatgacattgatttcccagccttctgccttagcagttcatcccatctttaactggttcccctctatctcttttctctagcttatatgccttgctggctgtgaaaggaggacctactgggtggtctatgaatctataccccgtatttcttttttaaagatcttaatttttctccctatttttccttgtgggaaggcattaaaaatgggactcaaggtctatgtgacactatatgaggtgccatttcctatacaggtgcacctctgtaagcagcatacagttaagagggcaatgcaaagaagctttgggagtaagcattctctcatatataaagttgagttgagacagaagttactttatacaaatatagggtttcttgttccttctaataggtggatggtattcttcttcctcgagagaagctgattaagttggattctgtctattcctggcttcagacctaatcatgaccattaaaaatatctatcttttcctttgtccaagaatcccactctggtcttgcattgtaattggtggtgttgggggtgtgttgcgtgttttcaataagccttattttagggaaatagcaaaaatagcatatgtactttcaattaaattgttattgcttttgaacatattgacagcaaatayttgttatttgtcagtagtggcctatatgctgtataaaagggaatcaggcatgggttttatagctaaacaagcaaggtataaatcagcaaaggataactaatgacagtggtggggtaacattttccataggccgggtactgtgctaaggactacctgtgcgttatccagctgaatcctcagaaccatgtgagctaagtattatcatacccagagagactatgaagcttgctccatgtcacacagcgagtaaatggtagagcccaggatctaagttcagrtctgattccaaagcccttgtcctaaacactgtgcaaattgctcttacacaaatttagtactgagcatcagaagactcagtctttcccatggagcaaagcagcaggaaaaccccatgaagcgtcagttagaaaccagactgtgttgagtctgtttataaattataatagtatttcatgtgttattttaagagtatagttttcaagtctcttgattgcctcagaggaaaatatacctatagtcttcttcccaagttgtgatgattgtaatcaatgctttgggaaatgttttcattctatcctttttgctgaaaacagatttagaaaaccacaacaattcagtaagatggcatgattagcaaagccctgagtttggttgctatgtatccctttggtgatttggctttaagacatgtaattaaaagggagaggattattagcaaaataagttaggagcttgttcttttgccattggggagtgaatattttcttccccatctactctttcaccagaagtggaaatgatgctgggtatcttttgaggtatatctgtagttcagttttaggttctgtaaggtagcatttcattagttctgtacaataaaaccgtcatctcagtacaggtttccattacagaaccagtgaagtgagaataaaactgaggaaaagtggtctaaatattttagtcagtgccttgtcattgaatttgtaagtttctggagcatacagtacctttatatcttgatttcccccatgtatatggtgacatgctttgcatggtaggtattaagtaagaatttttttctcattactattaaccatatcattggagtcccaatcattttcaccaagccatcatttaaaagaatcacaaaaatattagagctgacacatttagatctctcagaagttccacattttttttaactaagatagacaaatacattattcagtttattggtagataaagcacatagtattttcagagcaatgtcagtatcttattggccttgatttaaatgactatatttttcttactaagatttttacacaaattctttgcaattaaataaaacttaggaaggactaaaataggtagaaatgatcaggtaccaaagtatatcctgatatagaaaattgtgatttagtgttctattgttagaaccaactgcctggagcctatggcatatactaatttattaacctgtatatgctcattctgaaggaaataataacaataacaacaattgcttctatttattgaatatttactatgtgtcagatactttaagtatcttacattgattgtctcatttaattctcataaaaattctatgagatagatattattttacctatgaacaaatgaagctcaaaggtacacaggatcaaaaytggaatttgaacccagttttactgaacttcaaagctcataccctatattataaaagagaaatggccgggcatggtggctcatgcctrtaatcccagcactctgggaggccgaggtgggtggatcattttaggtcaggagttctagaccagcctggccagcatggtgaaaccccatctctactaaaaatacaaaattagccgggcatggtggcacaagcctgtagtcccagctacttgggaagctgaggcaggagaaatgcttgaacctgggaggcagaggttgcagtgagctgagatcacgctattgcactccagactgggcaacagagtgagatcctgtctcaaaaaaaaaaaaaagagcaatgaacacagttccttatttatactcatagagctgaacagttatttcaaggaggctacttgaccatttccagccactttaattgaagacatatcttaggtgattctcaccagtctatggaaagtagcaatacgaaagaatatgagagataagattagcaaatactgagtggaatcctgcaatatctgattattgctgcagagtgactggagactcacaagcccagtgggcacacagaacttaaaagattgtctttgctactcgagtaattcatttctttacctgaccttgccgtcccggtccctctcagccctcaattaagctgccattgatataggatttataatgtgtcactggtccattcaggatacagtgacagaggtgtggctgaaaagctggataataaaaaatggaggcaacttccatttctgttcaaatcagggtagcaacaaaaccatagctgacccttgtttcagaccagcacagtccagctagacaaatattccaagcactgaattgtgcactaaatgcctagtgcccctttcagaagggacattgcctctgagtgaccaagatgctcatagtttcttcccacgatgagaacatctaaaccttggaaaatgattgtggtattcattatgttataattttccagaaaagaatctgtatttattcttcctctaggcttctaaacaataaggtaggttttacaaatgagaattttttaggaatagtttcttgactataccaaatttgaaaatttgtgtggcattcgaccacatgaattaggtagtattagagtcctttccagggatcttaaatgttatgaactttattttgtataagtaggattatgctcatttgtgtcttaaatacacagtgagactttggacttttttttgttagaattttatgttagaatttaactatttaaaagaggagtgttatttctttagagtcaaactcattcattcctatatcacaaatttggaaataaaactctgacttttaacgataacaagcaaagaagccacaggcatccaaattttattttatttatttatttttatttatttatttatttatttgagacagagtttctctcttgttgcccaggctggagtgcaatggcacgatctaagctcactgcaacctcggcctgccgggttcaagcaattctcctgtctcagcctcctgagtagctaggactacaggcgcctgctactatgcccggctaatttttggtatttttagtagagacagggtttctccacattggcaaggctggtctcaaactcctgacctctggcgattcgcccgcctcagcctcccaaagtgctgggattacaggcatgagccactgtgcctgtccccaaattttaaattattaattgtattcaacaccagtaatatcttaggttgtggttgcaattttattttattttgtttttaatttatttttatttatttatttatttttgagatggaatttcgctcttgttgtccaggctagagtgcaatggtgcaatctcggctcaccacaacctccgcctctcggattcaagcgattctcctgcctcagcctcccgagtagagtagctgggattacagacatgtgccaccatgcctgactaattttgtatttttagtagagactggccttctccatttggtcaggctggtctcaaactcctgaccttaggtgatccgcctgcctcagcctcccaaagtgctgggattacaggcatgagccactgtgcctggtggatataactttaaaaattaaagtctgataaaatgtgtacatgtgcatttaattgtggttagctgcctattatttaaccaatatgataacacccctcagtcccaacttactcagcatttagaatgaattgatagaggttttactctgaaaaaagtcagtctatttcctcagttttctgggttttgaataactgctaggccttgccagataattctggcctaaagataaagctggtgaaagtcagggctggggttttgctacctgtgtatttatcagtcttctcctaaaccatagtctgccytttgatagctctaataattaatttggtcttcccygtctttcttctcccttgcccccyaccccttctccctgtctgttcacaggttatcttgacgaatcagattacaacccatctgagtggagccctggcttctcaggcagacctggtgtctccagctgatgatttgtccctgtctgaaggtaaggaatctgtcctggagaggctgaaacttgacactgacatagagccccactgcctctccacctcctgttgagagctgggagatatggctaataggccctggccagtgaacccagccggagcctgttgatttaggtttggccacctttcctggcatctgatctcttatattggggagtcttttgccctgcctctataagggagctccatttggaggccagtcactcctctgtgtgttatttcaagtccttagtatgagggctgatgaattgttaaatgactttgtttttgagactgatactcaaaggttggctttcccagtggtcccctagcaatttagccttttgcttgtgctgagttcttttggactaaaaagcrtacatcagtttcatgtgccagagatatgacattcctgatcagctttacagaagattaagaaaaaaatctccacgctggtaaatctgcaaaattttctccaccctcccctgctagcaaaggtcaggctggctatggtttcgatggcaataagctttacgtagctggggaaataacaccaataaaccagagggtggtttctagttttattgaaagtgcttacttgacatttctgagttgttatccttgtagtctagtatctttcatgcagaatgctgtgggtctgggtagacatgcatagctcttccaggcccctcctccctttccactttctgagaattgctcatgaaggaatacaggagacttttaggcctagcaaggctcctggmtggctgcccaggtgatcttctgcagatcagctttgctttatggtcttagaaattgcaagaaccacacctctgcttcttagtggtggctttaggagggaaaactagtggctaatttatgaaaactgtacaatgctttgtgtacgctccttccaagttcagggatacatcatcataacccctatcagcgaggctgaaaacctgaatcatcgagcattcctccctcctgaaacttttgtcatcaagtctgcttagtacttctttccgcatgtatctttcctttgtcccctcttttttgtaatgtgtgttgtgatcagcagatttactaaactcccaattgaattattttaataacatccagattggccttcccagctctagcctctacagtttccattctgccactaccaaattgaacttccccgtctggccttgttctgctctgttgctctcctactcagaaatcttagaatagttttttttgtttgtttcttttttgttgtttgttttgtttttgtttttgttttttctgagaatgagctaaaatcagtaagcwgattttaacatatttagggatttgggatttgttagcttgaaatcagccatkgtgaaagtatttataccatggaaatcagcaaatgctgaaaatcaggtggcttgtttttttatttcctccctttgygtagactggttttcaaaacaccactagataaagtgaatgatttyaacccttcataatctgtcatttcctttctattcaaatttagttcctgccgatatcttaggtgaagctcctatgccaagtgtgccactcttggcctgcccctccccactcccagctccaggcctgtgcagagacagctcacctagaacagtgcttccccckttcacttcttctgcttctcgtcccacatccactccttcgaggcttatttaaagactgcctctttcacagaacctgcttgcctatggtctcagtctctttttcctctgtggccgctctatctgctcaactgtataaagaaaaagtctagaaaattaatttaacttttcatgtttttctgcctgaattggcagattttaaagacacgaccatgtcatattctttttgtatccatgttgttatccagtgactagcaaagttctagacacatactaggcagtaaataaatgctgaatgaatatcacagtaaatacttcagaagaacagtgaccatgagaatcatataaagcacctatgaacattgttaaaaattgttataattattacacacacacatacacacatatacacacacacttaattcagctctgaggagaccagaatagagtaaactgcttccttatttgaaaatcagtaagtacttttatttgtgttgccttcctggtttatcttaagcaaagaagaagagcaaaacacatagaaaagaaattgcttcagggttgcagtataactgccacaagaaacccctgacttgtgttcatagcaaaggaagagttaccaggttatcctcccagaaatccaasaaagaatggaaataattgatttttctagatttttttttgtatagctgagcagataaagaggctatataaatatattcctatagtctataatgaaggtttttattagtggattaaaatgaacaatgtcttagaacatttatagccattcaaatatattacaatggatgttaagttcctgtgatttacacacacacagacatgcacacgcatgtataaattgctctgttttgcttcaagcattcattgtatcagctttgccattgtgttattaactgtggtgttaggcaggcccttttgatgactttgggtctcagtttcttctgttacatgacaggttggaagaatacaagattgctaaagtgttttccagctctagcatataagatcatgaggtaggtctgaaggtcaggagcattcacccactgatggggttttaattctgacttacagagtaggaagaatggccgtgttgctgatgttgccctagattaaacacaataaaaaggatctttaataaatcttagcactgatacttcggcatacctgcaggagcctttcctccctgtatgttttctctttgtcactctggggacacttctggtcttgtctgtctgtctcttgctctctctgcctctctccacacaaaggtgtacaaaatcagaagtgtgtgcaaaccagtgagaatgagaaacacactgggatggggtgactggtcaatttgcataagttccaaaagttccattctcccaatagtttgtgaatgggatagtttgtgaaaggcaggctgcaaattgacaagcacactgcaaatatgaggagatattttaagtaaatagagaaaattcagtttgccctctcattccttctcaaggcacaaagctcaggggcaggagcaatgccgggaaagtccttggcccttggggtgtacttctcccttctttggctctcccacctgggagctggataactcaacagtggaatgaaacctcaatgaagggaattataccatgatgtcaagcagtgaacatgagtctacttaatccaagccaacaactcagccacaaatttaataagggtggtggggcggggagacccagcaacacaaaaacaaagaactctcaactttacaaacactgggagggcaacagctggtcagccgagattaaaggagcgtgagagagcacctcccatctcctgacttctcctcccccatagacktccctgcagccagccagggctcgctttttacagccctgtgcagatgaccttgttccagctaagataggagctcttttgatctcagcagggggatgctctgggcctgcagctggcagatattaatagtacaggatctgttggggtggaagagatctctcggttgggccaggtcacttgtattccctcctctgcatcagagcagaagggacttcatttccctgagtcagcccctgctgcgtactactcctcttaggtcaactcagatcattttatcgctggctgctcttggctgcttgttctcacctcacaactgttttcaagggagcactgtttaagcagtgtactgtgcactgcagctgaaatctattacaggacagggtagaccttgccccccgcccccaaatcccagtgtgtgtctcatactcactggtttgcacacacttctgattttgtatacctttgtgtggagacaggcagagagagcaagagacaagatctgaagtgtacacagagtgagaaagagacagcaatacaggaaggggagactgttgcaggtatgccagagtaccaatgctaagatttctgaaggtcctttttgttgtgtttagggcaacatcaacaacacagtcatttttcccactctgtaaatcagaattaaaccctatcattgggtgaatgtttctgatcttcaggccctccttatgatcttaactgttagagctggaaaagactgtagcaatcttctagtatccactctgtcattcaacagaagagatagggacagaaataaggattttttctacattgttctagactaggtactttgagtcacagtattttcttcttcagatttcatttcattgacagaagttcagacatataggttattatagagttccctgctcagttattgtgactgttgtgtggccaaggacacatttcttagcccttgccaattcttccttatggtcattggagatactaagaactgttggacctcagtcataggtaacatctctttcccccagagtgattaatagagaagggatctaacagtccaaatggcctaagatgccatatcctattccaaagtcacctgggatttgagcagaaccagatgagtgcccacctacagttggtaggtgagatttgacaaatggtaacagtgagccctgtgcaagattgaagctatagaccattggcttgctttcttctgacgatttaacagagtagcagttacttcattatggtgacatggcccacttcaggagttccacatggctttatggaaaagaagacattattaggctgccatcttggtattcccagcatctggcatgttgtatcctgttttctgcattacttgttttccgatagaccatagcacatgaaaactaaaaatgtaaaatgtgtggataggtcaaggaaagaacacaagagaaatagcagcacttcctakaaccaakaktggtttctagttttattgttggaaggctttctattctggttggagtcaggggaattgatggctgatttcatgtgcaagagaaagtatttggggattcatattccctacyaaaccatccctgcgaaaagctggagtccatttgaaagattatatgcaagtttgtggcttgtgttctcttttaaaataagttcaacaagcaagacagctcagaatggttgggacaaatcagagactcatggttgtgaaagaagcaaacttcaaagcgyggtatgaattttcaagtcttatttccactcttgctttccagctggatctgctctggatttactgcaggatgtttgaaaatgtggctccctgctaatctcagacagttgctatgatcaatggtttctttcatttccgataaaaaacactggtgtttctacttaaattgtgtgtattttcagctttattattatagttatgatttattgtcctgcattacccaaatttgtaatccattaaccacagactttggggtgggttggtcaagttagcagaaatctctacatgctttagctccaaggccmttcacagcccartctcagactaaatgttcattggtttgtgtagggccatgtaccaacgggtatgagtggagtagttttaaaaatccactccttgggggtatggtgcaagttggctgtaattagtactttgaaagcctaaggtgtcaccatgtgactacaaagttaatattaacaactatgatcaacattattaacattagcttttccatagtatttttaattgtcttaaaatgatgaatttcttaatctacctcaagcaactgaagcatgaaggagagaagagaattgctgaaaggccacacagtgagagctggtgtgctgggaacagaagtcagagcccctcccgtgaagttttaaatttggttactgctgcctcttaggagtgagttttggataaaaatgtttaagtgtcctggtgacctttcagtttttgtttccaaagccatagactatatcaacacacacgattttacatggttctattcacaagggcacacgccggccagtgctctacttccctggtattcaggagtccatagcacttgactgggcatatgtcttccagcagctgttcagatgccatgaaaggcctgatttatagaaaaagattaaaagcaccaaaaaatgtgtggtattcggctaaagaaagcttaaatattatgtgaggtaggggaggctagagttgagaggagatgggcacagcctgcaaatgtcagaaaagctgtaaatcccaaaagggagaggaatgtgttgaggattttcagcctggaggccagggggcaatgtaacctcagctgggagaacaaaaggagaaagggaacattaaagtcaaccaccaggaagtgcttcttggtcaggagctctgttttgctggtgctagtttgtcaaaaggaggcacatttgaagcacaagatgcattacaatcaagttagatgagagccagagaggtttctttggggagcagtccttgaggtagtttgtgtgggagttgggctagctttaaaagtagtttcccctcaccctcaaatctttttaccgtctagaatttactgtctaatttctcaaatctgcactgtttctgttaaggtctcaatgtcaagaaagctggagggacaaaaacaccaaggcatctttgtcagttgcctcagctagagaggtgacgacagggccaaaagccgagagaatgggatgccaagaggtggtgtgatcccagaggccttcaagttagaaggactctctgagaagagatccttgttttccatcactgcagagaatgctataccaagggygagaggcctctaggtcagagatcataaagaagaaaagaatggctggattttaggggtggtgcccaacgattagtttgtgttgtaatgtggcatgaagcgtcttcagaatgcatttgcgatgtttactaggatttggaaaaggatcgtaacaaggtctagcaaggcagtctagcccaaggagggtccagttgaggtccgaactagtttctgatatctatcccttccaaaactgcatgtttaattaaagaacagccctcctctatcttccccagatagaggagggctgttcttcagtcgaagatatggagtggttgtgtttctctaccaaaacctttattccattttctcaaattttagcatacatcagaatcacctggggggcacattaatacacacattatggaccatatactgtatgcctggcatcgtatgtttattatctcatttagtcctcacaaccaccctctgaggatagtgcagttggccctccttatccatgagttctgcatccatagattcaaccaaccatgaatcaaaaaatagtaggggaaaaatggatgattgcatctgtactgaacacagacctttttccttgtcattattccctaaacagtacagtataacaactatctacatagcatttacactgtattaggtattataaataatctagagattatttaaagtatccaggaggatgtgtgtaggttacatgcaaatacagtgccattttatataaaggacttgagcatccatggattttggtgtctgcagggggccctggaattattcccctgcagatactgagggacaactgtattaattatcccattttgtagatgaaggaactggggcttagaaggctacacaattagtggcagagtcaggatttccacctagggagactggctccagaggtacatttttatccactaagctcttttgtaaggatacaattgagattatcatgactatgtataaataggaastaaaagacagccagatcacatgggtattgggaaggttgaaacttaggttattctcttcatttatctcatctctgtcttgcctttccatgacactgacacttgactttatgatctaattgacccattttatctttcacacctagtaattgtgttcatgggttgccttttcatccattcagccataacagtaaagaagatggccagtacacctatcctttcagcagggtccattgatggggggcattttcttataaggggctatatatgaaggacagattccttttgaagggaggtaaatacccaaacataacatctaatagaaggactttgtccagctgagcagatattataagtttgttaagtaggactgtgtagctctgttgacccctttagtcattttcattctcagcatcttctccttcttccatttattatttatttatttatttagagacagggtctcactccattgccctcactgtagccttggcctcccaggctccagtgatcctcccacctcagcctcccaagtagctggtactacaggcatgcaccaccatgcctggctaattttttcagttttgttttgtagagacagggtcttgctatcctgcccaggctggtctcaaactcctggcttcaagcaatcctcctgcctctacctcccaacatgctgggattacaggtgtaagccaccacgcccagcgctctcctttcaaataaaaattttgatagaagttacctatcactagtccatgccatcaagccaatatactgttttaaaaatgaaatgtaaaaatattttcttttagccccaggtaacctggctcctccttgatctaattttctttataccaataatcagcctttgaatttgtcttcaggaggggagagacgtctcttctgtttatccagaatccactcgctactctaaactattattatctggtgagatatgaggcctaaatttaaccatgtataagttacctcatattcagggacatataacagaggcacattagctagcgcaggctgtccccatggtcagccatgatctatccactgcttgagcaagggaagccagagaagacaagagggcagctggataactaaaatatgtgcagtggagaactctgtgtctgttagttacatccttttcatgatttacggtatacaagagcaaaattactctctaccctcaggggagtgtctgagttttgtgggttaaaagcaaatgtatatgtgtatatgtgcagtgtatgtgtgtgtgttgaaggtggaggttcccgtctttaatagaaggcctttttaggttatgatgttgattttttttaaccatacttccatctaataggctcatcaaagcagctaaggtaatcacatttcctggcactgtcatctccagctatagaggatgaaagaaatccagtggacaggtttaaggagacaaatktttttttgttttaaaatatgatgtttaggtaaatgaagctagaaaagcctcaaaataaattccttctgagtaggactctaggccagagatagaataagcaattgaaatctttcaatgtagaccccagaaaacaaacaacagtcgataagtggctgccagagaccaaggggtggatccaaggccagccaggaagaagtttcttcctccttcagggacaaaactagaactgagggaaacagctcttgccctttgactggatactacaaaactaaggtaaaccagcagaaagtcctgtcttagggtcattagaatgtgaggttttttttttgtttgtgtgtttttttttttttttttgagacatacttttactccatygcccaggctggagtgcagtggcatgatctccactcactgcaacctccacctcccacactcaagcaattcccatgcctcagcctcctgagtagctgggattacaggcatgcaccaccacgcctggctaatttttttgtatttttagtggagatggggttttgccatgttagccaggctagtcaaactcctgacctcaagtgatccacctgccttggcctcccaaattggtgggattacaggagtgaaccactgcgcttggccagaatgtaagttcttgtgggcaggaatwtttgtcacttttgttcagtgctggatctccacatcttagaaaagtgcttgacaataatagttaataaataattgatgataataaatactgtatgatgaatggcaataggcaattcagggaaccatgtgagaaaggaaagaacagaagtggaacagctcagcttttgaaggagaaatctcccaccttcacacaagggtggtgactgagtagcttagtgtgatacactataatgatatttattagccacctaccatctgctaggtcatgtgttagacaggtgcttgggacacatagacaaatgctacagtccctgctctatgggaagctcacaatcaggggaggggaagggctgtggctatgacggacaagtaagcaggttacatttggtgtcatgatggcattaggtttgggatgtttttggggaacagataggagtcctggcttggggatggaggctctctaggaactttacaacaaggaggcatgtgaagaattaacagcagttcttaataggagagagagaaggggaaagtgcacctggcagagggaaaagtccctgtcatggaatccaggcagggtgtagagccaggcaggggccggattgccgagaccagctcggttggggagaccctaacccagtggcgctagaggaattaaagactcacacagaaatatagaggtgtgaagtaggaaatcaggggtctcacagcctgcagagatgagagccccgaacagagatttatccacatatttattaacagcaagccagtcattagcattgtttctatagatattaaattaactaaaagtatcccttatgggaaacgaagggatgggccaaattaaaggaataggttgggctagttaactgcagcaggagcatatccttaacgcacagatcactcatgctattgtttgtggcttaagaatgcctttaagcagttttccaccctgggcaggccaggtgttcttgccctcattcccataaacccacaaccttccagygtgggcattatggccatcatgaacatgtcacagtgctgcagagattttatttatggccagttttggggccagtttatggccagattttggggggcttgctcccaacagaaaggtcttattcctcatgctgatcagtttgaattttttcctgagggtaatagggagccattgaaatagggaagtataaagaaaatgtggcacatacacactgtggaataccatgcagccataaaaaaggatgagctcatgtcctttgcagggacatggatgaagctggaaaccatcattctcagcaaactaatccaagaacagaaaaccaaacaccgcatgttctcactcataagtgggagctgaacaatgagaacacatggacacggggagagaaacatcacacaccaggttgggggctaggggaggtatagcattaggagaaatacctaatgtagatgacaggttgacgggtgcagcaaaccaccatggcacatgtatacccatgcaacaaacctgcacgttctgcacatgtatcccagaatataaagtataataaaaaaaaaaaaraaaagaaaagaaaaagaaatacggaagtgacggagtcattttgtagttggaagcattttctcaggcagccatttacaggttagggggatggagatgaaactatagaacttggattttgatctctttgaggcaagtcactttggggtggggttagccctaaacttcttaaagcaatgagaactttagaataagttttaacctttctgagatgttgggtggccaggtctggttctagcttcctaccttaccaacccaggagagatttctttggtataccagccttctgaataacatcaggcgagccctccatttatcaaggcgcctaacagttagaaatggtgtcaggctatctataactctgctaggatgtgagagaaaatagcaaatgacttaaagtactaaatggaactatgagggctctgtgtggtggctcatacctataatcccagcactttgggaggctgaggtgggcagatcacttgaggccaggagttcargaccagcctggccaacatggcgaaacaccatctctatgaaaaatacaaaaattagctggatgtgatggtgcatgcctgtaatcccagctacccaggaggctgaggcacaagaatcacttgagcctgtgaggcagaggttgcagtgagcagagatggcgccactgcactccagcctgggcgagagagcaagactctgtctcaaaaaaaaaaaaaaggcactatggaaattaatacaagtgttatgttccttttgctaatgattgcaataataatattgagtgcctattatgcgtcaggcactatactaagcacataaaaatgcaacaacttagtggggttcaattatcaccctcaattwmgaaacaaagaaactgaagtacgaagtatttccataacttgctgatgatcgcataactagtaattagttggcattcaaacctagagtcttgctctagagtctgtgctcttgaccagtataccatactcagctcttcaagatgatcatacaactacctcagctagagcttatgatcacatatttctgtcattgttagatttgagaggtttccatgcatcactataagtgcagctgtttctttatgtgtgccctgaaatctctatgctgatagtcagtagaaaagcagtgtgttttaacagaagctgaagcactgcatttagaattgggagacttgtattcaaggaccagctttgccacaaaccatctgtactattttgagcaaggcacttaacttccctrgacctcarttccctcagctatacacataagagcttgcattaggtgaagctggcaggcctttcagtttgcttcttctgtcacattctgtcttcggtgagcaaattggtatgttcaagcctcagacaggcttctctgttcacctcttgaagaaggctggaccaacccatctatgagcattttgtcacatttcttttgtcactgttattatattggatatctagagcagcaatcttttgaatctataacccatcattttttagcatattgccccaaagtatggaaaattgctgccaaaaactatagtgctactatataaagttatataaaacacaccagaaatagaatttttaaaatatgaagtgggttctagtattttttccctacatcccgttgagtcattgtgatgtattcccaccacttggtatagttcaaatttctcccttccttgtttttactgcagaactctttactgtcccaagtagagtgagactgaaaccaaaatttgagcactgggtccattcattcaattgttcattcatttacacgttaagtatgaagcatctataatgtgaaatgcttgctgaattttcaggaggccataagaacggtatcaggcttggcctctcccctctcaaacataaaggctaattctagtgtttttcagttttatctggttggaaccctagaattcctgcatactgtaatgaagctaaactttacatctaaactggctatatgtattgcactacagtgcataagacaagaaaagttacaaaaagaaggaaaatccagaacgtgaggcccacagacatgaaacagttgaagtcacactgtagtacagcatctaatgaattgccaggatgagagaagcagatttttaatatcagaggcattcacagaaaggagagatcatcatgatctttgtgatggaggcttggaccactgccttaggatgtcagggcagaactaagatgggccccttggttggtctgtcctkactcactgtgtctgcagtgcctggatatcagccagcagaccacctccatcattgagttagacccacttacaaggtggcaggctattaaccagtcccctgttccactgagaacttgccaggctggccatcatagcatggtataggttgaagtagcttagtacctgtggtggrtgactgtttttctcggccagctgtttaatgagcaccaaatgaagtaaaatgctgcttggttcctctcctctcttcagacacaaacaatcgagcacatcctagtggaagggccgtgttggggaactggctttcttgtgctgatcatcttggttcccacatccgtccctcccctctgggctagagtttggaggagctattgaagaaccttgagaaaactgttaaccttgaaagtttagttattcatcatcaaatatattaacaaacgtttgtagccaaagctttactgtctatggcagttttaaataattatcaaaatcatgatttaattaatttctctctccattttgggttggcttagaggagtaggagattgcaattcacaagtactttctggtcctgtaaccaacttgcactttcaagttcaggtaatcaccttgtccttttcagtttatttacccatgacttaggttaaagttgcccatgcctctggtgaaattcacaaatgaaacttcacctagctgggtttcatatttgtaagaaatcattttttttctccatgagaatgtgcaggtcagctgagacaagcatgattaattctagacatgaattagaacaagcccaagctgaacagctctctcagaggaagtcatctgaaattggtatgtgtgacccagtatatcttttgasaatttgcattggaaaccacagtgagcatggaagaaatataaccttgatcctctgrcctaataaacattcttgcaattctaaatgtacctagagtttgtgacaagtgtgtattggaaaactygttgaaaacacatgagttagtaatgttctctttcagaagatgaacttgcrtggccgaagtgagattccagtgggaaagacctggtagagaaagagtgggagaatgcgttgacctctggagggcagattatggcatgccaggcaatgggttgtgccatcagsgaaggaatctagaaagacgaggagactcaggagaaaggagatgacttctgttgacaggtcattgttgctcagacttagtgcagatgagaaaggaaatccagaaacctacatgacagctcctcttggattggatgaaaatattgattttttttttttttcctakctggaatttgacagggtcagttcatgtctgggttttcagcacttaatacagggcgcttttgtcttgggaggcggctggactggtttttcctccaggcaggtgcacagagggcgtttattgtagcctgaaacacaaacaccaagcccctaggccctgatccacacactctccagtgtggctcaaggaaataaagtgaacaatgtctcttgcaacaggcgagcactgtaaatgccactcctgaatgatatatttcttaaaactttgtatccgtaacctgatcatctcttaaaacttaattatatgtcagagaaaaggaagctattggctcctccagctgtccaggttgaacgagagcacacaatggagcatatccgattcacagccttacttaggtaatcagattaatatctcctgaattgaatttacccttttgatatggagtctttcagctgccttgtttcacatctcaaattctgacaaagctgtgcggcctttgagtaatttccctgaaatctatatgtgggaagcctgtacttcaagcagtttttgggacttgcaccaattaaatctgtctctggcacactttwaatggcatgctttcccctgagtcaacaactgctccaaaatctgaagtcatttgtttaatttaaaagcaaaggttatggaacaaccatttcaagcttcaccagccaaactccagtggctttgaaaagggagatgaggcagaggaaaggctaataaactggatttcttatacacaaaataaattaattactgtgtttctgtaagctagtatcaaatcaagtttgttcacaccctccttgccaacctagctctccctttctcttcaaactcaccctctctgggctttcatattcacgattgaggctcaccctcttactgttgttcttgcaacacaaacatctggactggatttttgtcagctggagttgagagagaactgtaaatgatgcagtgatttttttttcgtccttattaaatttatttatagccagtctgaagccaggaaacatgctagagcctttgattggaggttctcgaggaatgtacggtggatggtattttctcctgttgttttctaaataatakcaaggatagaattacataactcccaacttgagtattttttgccctgaaggaccctttattaggacattttgcacatcagaattcttccattatatttgcttatccaatatgccttcttttctgtcagtgagagaaaaggaaatgtacatgacaggttatttctgaaaaattagaaagatggagagtgagtttctggttgtttgggacatgaaccagtggcatgagtattttcttttgccaaagggacacaacatggatcctatttctacctcttaacaacctctgcaatcttaaagctgccaaatctcaaagaatttcattcatttagtcattatttaagataataaaaggccctacaagcagcttacgaaaataatttataaaatatttttctctgcccttagaccttgttaaataacaatgccttggtgtttataaaattatttaagaaacaaaactttctagaggaggctgaatcagatgatgatttcttgaggtcccttcccagttctatgatttgagatgattctttaattttccttcactgtcatttatatctgtgtcattaaaaaaaaaaaaaaaaaaaaaagggctgtttgggaatgagatttgctacacccgtaggcattttcttcttcagaaaagagactgtttagctttctgccacccaagtcagtcatcctcagcctgaacaatggagcttaatgttctccatcttcctaagagttagtgtctgttgttatgaaagtgaattgaaaccaaatgtactttctattggaaaagctgcccttgctctcagctcatggacaaaactgagagagaaggctcttacaaaacagagggaaaaatcctcgctgtcatgtcataacaccagttatttcactgttagacctatgaacatatctttgatgcaacactacactatttgatgatgtttctgtgtcacttaagatgggcgtttcatatttatctcttagaaatgttagcagatttttttcacgagttatcttgcttatggactggaaaagctattcttacagtaagacccttcattaactgagaaggcataaaagatagctcatgttctccaccaagaaaggaagctctgtttctctctgtctgatgggaagcatttgagacagagcagcttcatgaagtgtggatgtctgttacccacttcccagtttttaaagtaaaagccaagtcaayggcactggtacttgtagtgaaatgagccacagaggcatcattactcatcaccatcacgactcaaggatcagcaaatgagagtcctgaaggtaaagaatgtttattttcargtagagaagaaagaaaaatcacggagaggtagagaaaggtgaagggcaaaggaagaatccagcagacattaagcaacactgtatcttccaagatcataaagccaaatagttcctgctagatttaacttttattattttgggagatgaaaatcactggggcatggagttctcattctgcatttaggaacttccataatattttaataataacaataatgataataatgccaatcactttaattaaatctccctaaataagcatcttttaatgcagtgttgtttgctgtaaaacatcccaactaatggtagaggctggatgtctgccaaagacatggtgagggaaccgccacagagccgctggtattggaccctggcagagctggttcctctagccaaaggaagygaataatcatggggaagtggttattccagctgtgacactcaggaaatttcagtagaatgtgatggccttatatatggaatattcttagacatactaggatggcacatgtaaattatcatgggaaacataatttgaggaatacagaagattataaggtattatttgattcaggtttttttatgttagtttggagccattgtcaggcatggaaatactttcattgatattcctgtcttctataattcaaggccttaataataaactggttttgaatcaatcagttgtctgatagacggctcctgggaagactggagagccttatgagggtgcccacctctctcctgtgtaaaaggcccttcactctggcagcttcactcttgggtggtgttgggtagaagtaagatcagataccctgctcactgtaggatggaagggatcacatcaaagctctgagggctgttttcccctyaggcatccaaacctgatttcctcttatcacctgatatgaattttcgactgtttcactttttccttctctgtgcttgtgttttttacaaaaccatgaagcctgtaaaccacacggtagatatgatcacaacaatattagtggagaaccccatgctgttgtcagkatcaccatcataggtatgagtgcttgatgcagggtgtgagggggaagggggcagtctttttaaaaagcaggtcacggctggacgtggtggctcacgcctgtaatcccagcactttgggaggccgaggtgggcagatcactttaggtcaggagttcaagaccagcctgaccaacatggtgaaacccgtctctattaaaaatacaaaaattagctgggtgtggtgrtrcacatctgtaatcccggctactcgggaggctgaggcaggagaatcacttgaacctgggaggcagaggtttcagtaagcagagatcacgccactgcactctagcctgggccacagagcaagactccatctcaaaaaattaattaattaattaaaaattaagaagcagattacctttgaacctgtttagatagtggtcttccatccatcacctcttaactcctcatctcccattttcccaaccccacacacctcatctttgcatggatgaagtgcagtctctccagaacgtttttgtgagtggagggatgcagagtagattgtyggtgccatgtctacgttgttaactgcagtccaacatgtaatctagttaaaaaaagaaagaaaagaaaaacccataaaataaattttaatagactacccctaggcaactttgaagaggaaatcattgcaagaaaatgagacttactaaataggccatttgagaagcaggcaatggctattttaaaggcttgaggttttaatatatgtatatgccttttttccctcatctcttgcaaataaataatggtttacatcaggagacaattcaggaaaaaagccttttaaaaaattttcaggaaatctggccaccgtgtttctgcagccactgataaatgacaatgccaccagcagtgacctaggacatcctgaattcttgctcttctgaagagcttgcattctcttttcaaagggtatcctgttcctattgcaatctttaagctatctcagctcaagatcaccttttttccttttattatcatacttaaaacagcactagtgctgttaagaagactccacccatagatgttgatgtcatttgtgaggaggacaagatttaaagagaaggtaactgggccaggtgtggtggcttaagcctgtaatcccagcactttgggaggccgaggcgggtggatcactaggtcagaagttcaagaccagcctggccaacatggtgaaaccctgtctctactaaaaatacaaaaattagctgggcatggtggcatgtgcctgtaatcccagctactcgggaggctgaggcaggagaattgcttgaactgggacctgggaggtggaggttgcagtgagccaagatcgtgccactgcactccagcctgggctgcagagcaagactccctctcaaaaataaataaataaataaatagaaggtaactggatattggccccaaacatattctaattcagcaaacagacccattgaaactcagcattgttatttcaattcatgttgtacaaatcaactaaatacaattttgtctattttcagggataactgagtgttcttcatccacaaaggcccaagtccgtataggacagtagcacaacggggaagaaatgtgtgtttttttttgttttgttttgttttttagtgctgatgaaaggtgttatatccaagggtaagttataaacagagaagctgtttckgattgtgaagattggctcagcctgcactgacacttctgaaaaggtggaaagagcaaaatcgcagttcyctagagtctctcagttgtgtgatatccatgcatgttcggagcagaatgtataacggatccaccgttctgcttctctgctgtcttctagtttaaaacatgttgcaggctaaaatgcagagggagaagattctattggtttactcatccagttattaagacaaggatgggatgaaggatcagtcttcacagacctgcaaattccctccagtattgaccctgttgttgcctgagggcagctgggtcaacaggtataacctccctttttttccctgaacaaaggtagctggactttcaaggaaaaaaaaataatccagccctggtaatcacacaaacagttctcaaagctcaattaaactaaaatgccttgtttcagtttctttccacagtttatagattttaccagcataattatcaaactttaaatgtttctctcttccattgtcttgttctgtttggttcacctggtgatgtttgttatagcctttctatttgaggaattagtggaagataaaatgttgctaagagcaatttcgttagtattgaaaatagcaggaaagaaatagagggagcagccattgttagcaaagtagcctggttatgtgtattaagcttgggaaagaattaaggccatttggtctattgatgcaaaataccttcgttttactaaccacagaaaaagcccttggttgggttgtcttgagtagttagaactgggggtggccaagatgactggttgctgatttccagcactgtgcatcaaccaccaaatgattttaactttcaaagtttatggggaaagggtacgatatgaattttgaggtttttgctgcttcttatgcaaaacattatttcggtttcaagcagctgatcacaattgcaactgcttatacctggtgaattataatattctctatgggaactgcactgcatgtctgtgggggccgtcccatctgcctcctttgtgaatctcttctcctttcagtgcctcctaacttgggccccaaagaggggtacagcagctgaatgtcattctcttgggctgtggcccaggcatgcatctttctggaaggatgactgaatcccattcttaaatctgaagttcctcttgattagcggctccttttgtttgttgtttttaacggcatttctgtctttcatgggtagcttacagggatgtgttttagagccccttccagctgggaagccgcccaactcccaccagctgagtcgggggatggcttccctttagttccgctgctgtctgtggactacaaggactccacttccagccccagcaacagtggcccttgtctgctgtgcaaacttggctctcttctctgggttttcattctccagccatctgggcattttgggcacccctcttatcttagtaccttggcactcaggaccacatgtcatcctatcatagagatgcaaacaaaggaatccttcacctctagcttgcagttcccctggaaccatcatagattgagtgacaatcagggagatgggggcttgggcattggtcttgagtgatrtaaatggtttttctaatagaaggcatttggaatgggctgacaatagctaggattgttcactaccaggattcttagtgcctagcttcctcctttttctctggctatcttgaaatctaggaggaaggagctaaagaccccgtggcctctgattgccatagcctctctaggcctggaagcttcagcttagggactagaatactgctgtgtgccagagcagttcatctagcttcctattaagaattctatgtgcattacccacttttaaaattcctcctcctacttcctcaacttctggcttggggagggtttgatcagagtcattctctcttcagagaagcatctggaaagattgatccaagagtgctgatagcaagttcrctatcatcgccctgcctcgaggaaaataagcattcgataaaaggacrcttccactgcccagttcactcctactccactgtgtcttctcctgtccctccccctacccctctgacccctgcactcattctgatccctcttcctgcccgaatgtctctcagtggtcaacaaggcatgagctagccaaagaaaatgcaaccaaatagtgttaatcacttccatttagacctcagtagtcaggtggggctgcaggtctttgaaaggcagacttaaaatgcttgcctcttttcagcgaatctgattttacatttggctgctgatcattcagcccctggcatttgttcatacattggaarcccaaagcttccacacagttgagtctacagagcagagtaatattaacaagacttatcttggttatgatgccaaaaccatggtgccacttcatttcacaccaaagtggatggatcttatttatttattttttaagagttgaggcagcacagagaagctcagagattcattcaggatcatccactgtgtccaagctttgatcctctggcccttatgacaggcaatgatggttcagagtacagacagagctcctgtagagcgtgcgaccaatttaactggaaccatgggttcttaattacgacttcccctccccacccactgccaccaccatccagttgccagaacccagttggttttctgtgaaacggcagctagtgacactttgcatgggttcaccagaaggcctttcagtctttgtctcattttaattgtgtatctcaaccaagaagatcaactctccacatgtaaagttaactccctttagttttcaaagtttctttccaagaaccacctattgtcagtccctcatcctgtgtctggcaaacttagaagaaacaatgaagttcacagtacagactgagctcccgaagcactgatcttttatgtatctaaatgagggaagaaggaatgcatattctctggcacaagctggctctaccatgtgatttgaagtaaatggccattttatttcacattaggaggagagacttggagcagtttggcagcagatctgtagcgggttattaatctaagaactatagttttcttccacataggagattaaatacccatctttcgtcagatcaaagcaggcctcttggactatctgatctttgcaaaaggccccatgttgggccagcacaacagtctttgcatgtattgctccctatgttaaaaacaacaacatcatcatcattttagtatgtgtaaataataaggtctgccagcattagcagctctctaggcccaaagtaaaactttaggttttttttctttttttctttttttgagacagagtctcactctatcacccaggctggagtgcagtggcrtgatctctgctcactgyaagctccacctcccgggttcacaccattctcctgcctcagcctcccgagtagctgggactacaggtgcccgccaccacgcccggctaatttttttgtatttttagtagagacagggtttcaccatgttagccaggatagtctccatctcctgacctcatgatctgcccgccttggcctcccaaagtgctgggatwacaggcgtgaaccactgcacccagcccctaaaactttagttttacttgaactgactttatattaattttctactactagaacaagtcactgycccccagagtttgaagaaatgtgaatattaactagggcttatctgaatgagaacaacagcattgctcttttcgtagtgttgtaataaatatcatcttagacttatacggcattttctttagggcattaatagagtttatataacctattgttcatttacttgatagctcattgagacagtttaggtattgatgctatattcaccatctataaaatgggaagaataaaaatattaagttcaacttaaatgggttacaagaaagaatacagacatttgtatgatctatgtctccaagatactgcctagagcttttaaactttgtaagttctgcatttcacctayccaagggagtctgagagtgtgtaatttgggccagggcacaacagcccttggccaggttgaagtggacaaacaaatggaattggttccagtttaccaacctggcacgaattatgtgctggtcaaggaagtgtttttcaaatcatggggagccactagtgaaaatctactggtgctttgatggtggcctttggagatacttttataatttgaaaccattcccatggcaggccagggagaggtcttactttagccaacatgcaacattaggtagaagaaatggggcctttctgactggtttgacctgtgggtgggccctcttccacatgtytctaattaggatgcaagraagagtagatattctgtggcgactctcctttccttctcggctgtgagacagaacaacagcgcctttgtgatgacctttacagggctgtttacatttgktgacctgcctgaacactcccgccagagtgracgcacctcttggctaatgaggaacagccatgctgtcttttactatggtagaccttggaggttaaaatgaaaaataagaggatcctctgttgatgactagtygaagttaattttctttacagatttattgaggtataatttacatactataaaattcacccattgtaagtatacaattcaatgatttttagtataataaatttataaagtcttgtcatcatataatccagtcttagaacttcgttggagttattttgaaaacaccaaataatgatcataattggaatgtagatcatgctgaagtgaaacagaaatttatgaggctatcttgggttaaggaagagggccacccaggaaactatttgagacaattaagtctcaagcttctcaaaatacatgaaaccttgagattagcacttatatttcagaacattttccatatttttgcttaccaaatggtatgacctacttgaaaaaaaatgagaagctgctgcagaacctgcctcaggtgtcagcatcaattaatgtttcatggttataatgagaaggagcagaagatgagagtctaagctccccttaaagggcttatagttcactttgaacatctcatcacatatttatttacgtgccctctcattttcaagtactgtgttaggtactgcagacacatggatagtgagacaatgtctctacccttaagaactagtagtccagtggtttctgttaaatttcagtatgatgtcataaattctgtggtaaagtgccgtgtgatgtcaggaaggtcatcagtaaagactttctagagttgatgttactaagaaatcaatgacatggttaataagctcactagtcctgctgacactgagtccctaccctcggctccatttggatgaggctctgtgagatccagtccctgccttgggggctttgtcattcatgagagaaacaagtccatcactccttccagttagatatctgtgaaaaggtggaaaaagcaaagaacacttggaatttgggagagaaagagagaccatttaagggaagaattgcatttgagttgaattttgaaaaaattgagataggcttttgccsggcatgggtaaaagtgggaaacagtccagaagaaagatgtgagcaaaggctcagggacaggagaacttgggatgtgttctgagaacagtgagtaatccaaaatggattgatacatatatcacatagtatagctatttctatatacttatgtcagaaacaagggaattaagggaatcacaaggctctgctttgcctgtatcaaggaaggcttcctagagaagccattaatttcactctgtctgttatgcatgctttacaccaaggtgatgtgattagttttcttctttggtttcttctttctgaattcatcaggtggtcacacccactgggccacagaaagcaccagtggattttcactagtgattcctgtgattaaaaaacgtttttgaccagcacataatttgtgccagatttgtaagctagagtgaattctatttttgtccagttcaacctggccataggctgctgtaacctggcccaagagcttaatgtaatactttcaagaagattaaaaatccaacaatcccttgaaacattggttgctaacctttgaaagagtagtcactgcacctgaatagccttaggaaatgaataggaggtctgagaaaaagaaaaaaaagaagagtggtaccatttgcttaaaatccctagggccttatagggtaaacctatttctaaatttaagttgctaagaccttgaacctggggttgtttggggatattttggaaagtaaggaatattattgactttccatcaggaaggaaagaactcagttgtttttgatattactaagaaagagagagttttgcatttatttgtttgcatggacrgtctacctaccgtgtggccttgttcatgacatggcggacctccctctctggggtcagtgtgaatagccaggctgcagctgtagctagagacaatggccagcactgttgggccttgccccttaagccccgaaggttaatttcctagtatttagtggcattgaacccgccaaagaaaatgctgtttcatctgggggaagataatttctgcatgtgtatttttttcatgaagaataaagaagagatatttttggaagaacataacttaacctgttggccttggctaggaaagctaaaaaagcaaggggtcagtactcttacaagtatcatgtcttaaacgtcagccaaccagtaattatttagatgccatcagaggggaagtcccatcccattgttattttttctctagactgtgagatgctttaaaaaaacctctctgtagggaaatgatctttaaaaaacaaacaaacaaaaagcctgagaatttagtgctgcatttgttgagaagtaagggccctggaaacggaggagtttttgttgttgttgttttggtgactgctttgccactctgcatgttacaaagggcaaattcttggccactgtttagggttcccaaaaaattccaagatgtccagttaaattagaattttagataaacaacaatttttgtatgagtacatctaaaatattgtactgggacctactcatacttcaaaattattcattgtttacctgaaatttaaatttaactgagccttgtatttctttttgccaaatctgcagtgctttgttacttcaataaaaaaactgtccaaggagcctgggagcttttatgattattgaaaatcactgtcaattttaaacctaaacaaaacaatagataaagctttgaaaatagaatcaagtccagtcataccaagtgaaaggagtcctttctcatttttttatcttcttgtagccagctctggggatccaattctattgggaatggctcacctaggtctactgtagctcagagttataccttgtagatcacctggatgcttctgtgttccagctttaactcagaggatcaggtcagaatggaggctccctttgaaatctaaagtgcttagcttctttagggtagctccacaccctttttaattcttctgtaaaatgtctatctagcctagagaagtggagtctcactagacatggttctgagaataatagctatcatttactgagtgcctaatatgtgccagtgccttacctgcattacctgcctgagttcatactgccttctaacaaccctatgagacagatactgttatctccattttacagatgaggaaataaagacccagagaggtttagtaactttctgcaggtcacagagccattgaaaggcagaagtgggataagcattcaaatcaatctgactccaaaaccccttcagtaaccattgtactactgcatgtgatgcccttagattctccacttttcctctccctccccaagcccccagtttggcttgatattggaatcatccctttctctccttgttctttactggctggaattaatagagtactttcggtctgaaactggccttaaagaatctttgtccgtgtgtatcacactgcaatgcaatagacgcagaaatctgggcactagaagrtgttaactttggatgcctcctgttttatatgcatatgattaaaccaatggggaaagaaagccctgaaactttattacaacatttttgtagtattaaatttgacatattaaaatgtgttatcattttaatatctttaaagagcctgaggagactctcaagccttagactgtaaatagctaacagctttgagatgagctkacataggagtcaaatgattgttccaagatggctgttctaattctgcagagctaccgtagtattcagcctactgcctgccaaaggcaaggggccttgcccctctcttcctcctccctgctttcctctttgttaagaagtaacaaaaatatactgcccaacacccactttcttttagaaccaacacatattccttctggctcactccctctataaaatgatttgtcagcattttgatctcattaaataaaaagttttacttggtcaaactgggaaagtttatgaagttagcccttccatcccatcatctgctgtggccacagttgttgactgtgaaatagctctgtgggtgtggtctaccaagtatcccaatagcatttcttacactgtgggctatggacccaaaggtctggaagagttgttttcatagggtcacactagaacactggctctttctggttaaaagcttccctagcctttctcctccaactcttaacacatctctcatgtttctttcccccctgcagaagtatagaaacctcctcttttcttttcctctgcactctcctcatctgtctccaagtccccattgtgccatgtttctcctacttcctgtttcctttaaccactaacttctcacgatttttaaaatcaagcctatccaattctaaaaggaaattgaaaccctgcccmccaaaaaagtaaaactagggggaaaaagccatagtaggaggtataatgttatgatcttctctcttagccctacacatctgtaaaaagtaatcttgctccgtactgcaagactagggcagcccagtygcccactccccttttattctccctcctcacattcccctgtccttttctaacccaccttcccacttagggtctaatttagccaatttatacactcgccaagcttgcaaaggttttggttctctccttttgggtgtggaatgctggtgccacaggggctttcagaaacaatttagtaagtgatagacttggaagagttcaaaagcagctctgggaagacatcactgatgagtctctgctcttagcattttgttgcctcttagaggcttagcaaatagcagcatttgatccataatctgctctttcttggtacccagagaggcagcacaagggtagaccttgagcaagttacttaaactctgagcttctgttgccctttctgtaaaaaaaggcaaaataatcattctgacctcacattgttgctatgaggattcagttagttaatttttaaattttttaaaattaatgtgtttatttttttgagacagggtcttgctctgtcatccctgctggagtacagtgctgcgatcatggctcactgcagcctcaatttcccaggccccaattatcctcccacttcagcctcctgagtagctgggaccacagctactcccacttcagcctcctgagtagctgggaccacacctggctaatttttgtatttttggtagaggtggagtttcaccatgttgcccaggctggtctcaaactcctgagctcaggrgatctacctgcctcagcctccaaaagtgctgggattacagccatagccactgcgcccaacacaatgacttaatatttataatacacttagaacagtgcttagcatgtagtaagcactagattaaataaatgtrtaaaatgaaggaagaaataataatagtgtttttcttttaattcatgcatgaagaactatgttygacttctgtatggtatcttgaaggggtccaaaataaatctgacyggcagtttgaaggcctataagagagcatattacataatttcactcaaggattttgacaattagtccagcttgatggatctcttctcacctgtattttggccaaactgaccaattatttcccattccaactgccatccaaatttccytccccatcccttccacatgtttcagttgcttttgctgcctttgcttcatattgactgtcaggatgtatggccctgtaatactaggtttttatttaaaaagcctttctctcattcataagcttcttttgaggagtgaggcctgcatttctgatggttgtgtatcattcccatgccttgtgcataagtggtactctatccatgtgttttgattggctgatttgagcttttgcagattaggaaatagttggcctagagctaagtggcacctgagagaatcttcccctccaggcctcacagatgcactctgtggaaaggccattgtctccttgctttgtgttggactattaggaacctaaaagctaggacaggcctgggtagagatagccacctttaagttaggggaatgttggggagtctactgggatttgactgtgaggtgaaaggagggctgcctacaagcagaaagcttaaggcattggctttgtgtaattaccaggaatgcttttagctagcaccttgaacggttggttaaaaagggacagttagatgtttgttagatgtgtggtgtyaataaccttgaccagtagattcgtgactatgagaatttcaaaaggcgaagcaagaacacacacagagggaaaacatctcttgtttctaggggcagccttcccagcagcactcagcccagagctgtttttcccccaaggagaacacagggacaaaataaatatgccttcctgacccaaagacaggagcgcccagggagaccatgggatctgggagtgagagcagattgkagggaggaagtatccaggatgagactggtattagctacaggctggacagttagtcggtggcagctaggtactgctgctagtggctgagggcagggtttcttagagacctgaagatgtgagcattcatttatttgttccttcatcattcagcaaacctttactcagtgcttattatgtactggatactgggctgagcccccacttgtgacctcactgggcattgagtctgaggccttggcagctaagggtggtgttccttagggaactgggaggccatccagacaggaggcacagtacaaacaagaaagaactaggggccaggtatggtgtctcaggcctgtaatcctaacactttgagaggccaaggcaggtggatcacttgaggycaggagttcaaaaccagcctgatcaaaatggtgaaaccccatctctactagaaatagaaaaacagttagctgggtgtggtggcaggcacctgtaatcccaactactccggaagctgaggcaggagaatcgcatgaacctgggaggcggaggttacagtgagctgagatcgtgccactgcactccagcctgaatgacagagtgagactcctggggaagcccagccctgcatcagagaaagtgatgcactgatgcttcacacacagagaatggaagcgggagtrgaggcatttttctggagttcaagcttcaccttcaagcatgatattcagattccatgagagcatgcagaaagagcccagcggacctgttgaacagggcataccattgtgagtccttagaagctaaaagacagccaagaacagtaggaaagaagctgagaataaaagctaagacaggtacctccaatctctaaaaagttaaacctcttagaggattataaataaagccacactcacaggtgtacatgctataatttattttataagtgcctggcatattaataaatggtatgtagtttacttacagwgctgtttgggtggttctcaagtaatctcttgttttacattctaaagtccackcagtgttagaatggaccatttgagcccaagtagattcaacaaaccatctatacccaacccgcacatctgggcagggatgacacttgatgagccatccaggcctcatctcatagactctattcatcccctgctgtcatgggcaccaaaacattttatagtaaattgcacagtagtttgtctttcccaataaactgtatgcttcttgagggtaggtaccctatctctttatctctgacacctggcacacagcccagcacatgacaagatcaagaaccaggactggccggggctcagtctgcacgtgctctggctttcaagtggcatcttctaatgatctgaaagacctctctagaacttttttccttttatgttatgtaaataatatacttaagatagaaacttttgtgtttcatgttgtatattaatgttgaatataaagtttttttctagagtgtgactattttttcacctagttccttcaaattttcatccctaccattagtttttcaaagtctctggattcctgttgaagtatccttttctctggaggtttatatcacctcctaggctgcttttgacttatctactcatgctttacttcggtagtgctgatgctcacccccagttattcctcacctgtaccatgtggtattattaatgcaaatgaggctttacccggctatcccctcccctagcatttatgcattcttcagggaaaactctgttgtatatgtctctgagtctcccacagcaactaacacagtgccttacactccattagctcctcaacgagtatgttttaataaattccattagtggagtgaggtagttaggagcaggtatgagctcaggcctttgagtgggacaacctgggtctaatgctgcctccttcactaactacttttatgatcttgagcagtctgctaatcctccttgtgtccaacttcttaatgtttaaaatgaggataatagtagtacctacctaataaggattaagtgagttaagatatgtttttgagggttaaatgcattaaaatatgtaaaacacttagcacaatgcctggcctgtagtgagagctatcattatcaacaaccaccatcataggtacccattatcagaagttgggggtttggataaagaaattaagtttctctaggttatatttttgtgaagtctgaactggaatgaacttcttcagattcctcatagagtacttcatgccccgcccttttattgcacagggactatatctgcttcagtatgatgtagaacatcttgattaagagtatttttttatctttcgtccttgacttatcttttggtgtgtaggtatattgtttcatcacattctcatttttttttttttaaaaagagttgttccatttcccctttttctgtctactgctttctccttctacgcttaggccaagagtatattacacttggaggcatctagttagcgtggtgcttcccaaacctttccaggacccaaaataggctaaataccacaccaagggagacatcgatgatgttctattaagaacagtgaaagggaacccaggcataaatatacactcagtatacacaactgtcaccacccatagcactgaccatcctattgtaccttagaacttaacactgtaatttatctgagtgttttttaatggctctctactaagtgtcaagctctgtgctaggtctggggaatggaaaaatggtaagacatggttcttgctgttgaggtgcttagttgtaacaatttattttcatcttttattaaatactaattgaataatgttgttattctttttttttttttttttttttttttgagacggagtttcacgcttgtttcccaggctggagtgcaatggtgcaatctcggctcactgcaaccttcgcctcccaggttcaagcaattctcctgtctcagcctcccgagtagctggtattacaggcatgcaccaccacacccggctaatrttgtatttttaatagagacggagtttctccatgttggtcaggctggtcttgaactcctgacctcaggtgatccacctgcctcggcctcccagagtgctaggattacaggcatgagccaccaagcccggccaatgttattattctttaagtaaaacatgtttccccaagtaaacttactgtgtgtttagtaccatcctggaccctcttactcacagtgctatttgccccactactacccagtaaaaagaaagggtgacaggttgtaaggacatgtaggggtttgaggaaagttgggcttgtgtcaatgtaataaaagccaagtagttcttcttccagcccagtctgtatctatgactagatcatgaacagagaactaaaggcttttgattataaacctccttatgcctaggcttggcccacactcaactctaatacaaatagtagtaaatgttaggagtagacataaaatgagcacaggttgccactagaactttttctataacctaattacatttttttcaacctaaaatattacatattgtgtcagccaggatgccatcaggaaagagatggtgcactttagtattccgaggctaattacagtggggctccattagtgcccctagattgagaaggtgagggaacaggctggtttctggaagcaaggagatagagggggctgtgtggaaaagactgcctagcaggatctgagaccttccatcaagaggcacagccagtccatagcccaacatcactctgctccttcaaatctcctactggtgcaccccagtggcccaacccaggagagtcctgttgatgtgacacacacaggccaggtcccagggcagagagcaggtgaagaatgattgtgagtaaatctagaggggcacacaggaagatatccagcaaacatgtttcacacttgattttagaggtaagggtgtgtatcttaattttatctgttttagaaaactaaaattttaatagatttaaagtatttctgccatagttcttaaactatcaatctgatgatgtcagatatttttctcagtgtcattagtttgacctcccgccacatttttttggtggagaggggtgagggattgtgtataaatttcctccagagcacacagagaataaaaatgctattcttcagtttgkttttttttttgttttttttttttaacaaagagttgttccatttcccctttttctgtctactgctttctccttctacgcttaggccaagagtatattacgcttggaggcatctagctagtgtggtgcttcccaaacctttctcagccaaagactcctctgggaatccaactaaatttcctggttcccttttgcttttaatatcaatgaccatattacccaatgaggttatttttatttcttacaaatatttttataattaacttaagattcaacaaggagccaaaggtaaacagactgtaattatttcaagttctaaccattatgagtagatattaatcttcragaaggtattattaaaaaaagtatataatattcataaattaaagtcaacttataagtacaaaggaatatctgtgactatraaaggaaaartaaactggaatttaaaatttaatcactgtgccttagtaaacacgatcctggtacatttcagcacagtatttgtgtttcagaataggattttgtcttctagttattcactaatacgtatttattttactatcattcagcaagaaaccctttaaatcactgtcaaaaggtaggtgatttactggaacagctaacctacctctgcctagagtcccataggcactcacttccctatggaaccctctgtcccttcttcccttcctatatacctcaggtacctttatgcagccttgttctattgccactctgcctgttttactaagctgccctaaagtcactgcaaaattttgatcagaacattactgaaccaggacacaaagaaatgctcattacaggctttaaatatatgctttttcttagatctatgggaacaatttctctaattcttaggttttgctccctgaaattacacagaaagtactgtatcttcttaaccctttctccacccctcctttcatttcaacccaacaaacttttctcctgtgcattgctaggcagtgcttccattgtccttaagtgtttaaggtcttgtgctggtaatgagccagtagtcacaaagctagccagtgaatttgttcttcaagcctttagtgattccatactccatataatggactataccatttgtggattccttgacagccatgaggagacactgasggagctatgaatagaagaaccctgtgttctcccctgtccagctcccctggcttttggaaacagaacttcaatttttcttctccatctatgtggttcacatggaactgaccccatcctccaactctagaggttgtctctgaacttgggtcagaccaaacgagtttcagtgcttggtttagaaatgaatatgtaaccgaagctgagcatgtgagaatccaaccataagaatttggccgagccttctggggaagaggagcctctgtaagctagggtcactaaattggtacagtgaaagcctgtagccaccactttggagaagcctgcctaagactaacaacacactgcaaggaagagctgaaagatggagagagactggttctcatcatcatttgaccactcaagttcagctaccttggtcatacaacccgttaaatctatccccagccctaccagttattttgtatattatrtcactttttatttttatttatgtatatattttttgagacagggtcttttgctgttgcccaggctggagtgcagtggcatgatcatagcacactataacttcacactcctaggctcaagtgatcctcccaccttagcttcccaagtagctaagacaagaggtgtatgccaycacatccagctaattttttattttttgtagagatggggtctcactatgttgcccaatctggtctcaaactcctggcctcaagccatcctcctgccttagcctcccaaagtgctggaattacaggcatgagctaccacacccaggcttattatgtcaatttgaatgtgcactctgtcacttataacccaaactcctgagtcaaataccagcacatctgagaattcaacaacttctgggatccacagccccatggaggctacaagctactaaaaagataggaatgtcagcttcagctaagaattccagaaatctacagaaggtacctttccttttctttggttccagagagcatgataatatacatacagaattctggaaacttgggaccaataatagggtgtattaccaactgtgtgtggtatctgtaattaaatattgctaaaaccctgtagaggctggtttttacctttaaaaagatcatcttaaataatctgaggatttttattttaaataagttaatgttaaaaatattttttgggccgggcccggtggctcacgcctataatcccagcactttgggaggccraggcaggtggatcacgaggtcaggagatcgagaccatcctgaccaacatggtgaaaccccgtctctactaaaagtacgaaaaaatgggctgggcatggcgctgcacacctgtagtcccagctactcgggaggctgaggcaggagaaaggcatgaacccaggaggtggagtgtgcagtgagccgagatcgtgccacagcactccagcctgggcaacagagcgagactctgtctcaaaaaaaaaaaaaaaaattgatagcatgaaaatttgaagtaaagagtcaattatgttaaagaaaaaaacactccaaaatctaacatgatgctaggctatgttaacaagagcctggcattaaaaactgagtcaccatattcagcattaataagatactagcaaagctctcattcagctgccatgcctaggttgtgcttctgcatgttcagaggatgtggaaagcaattgaratgattaaaagcatggaaaatcacatctctgaagagcgatgaaagtaggctatttaactaaaagaaaagaagattgaaggaagaaaataaatggtgtttaagtatagaaagagttcttataaagaaaaaggtgtccagatgtttcccccttccactgagtatattaagagaaaattgccttagacatttcatttttacaaaggaaggattttttcaagcaaataggattcttgtactgsgtgtgacattggactagatgacctttaagatttttcttcactaagattctatgattaccagattgaggatgtacttatcaaaagagtgtggaaccacttgctgtatgtcttaaaaggtaagatgaggaaacactggctggtttgccttaggtgtcattctgcccaggagttacttccaacattcataacatgcctttgaagaagcaaatattgtatatagacaaacagcatatcagaaaaaaatcaaaacaaaaacaaaggaatactagcattaaagtaataataaaatataggatttttattttctactctttcagtatagccattagcaattcacagttagtttcttcattaactagataagataagtgaggcaaatcatgggacagtttagtattggtgacagtgtgtttggaggggtagaattaagtgttccatatggaatcaggagcatttaatgtcagctctagtatgtatgtggcatatttcctactgcaacttaattggcataattttggatccagagaatacaaaccaagactcagaaaactatattttacttttaaaatatagttttaaaaacaattctaggtttatacatggaaaagctattctaaagaacaatagctggccgggcgcggtggctcacgcctgtaatcccagcactttggaaggccaaggcgggtagatcatgaggtcaggagttcaagaccagcctggctaacagggtgaaaccccgtctctactaaaaatacaaaaattagctgggcatggtggcgcgtgcctataatcctagctactcgggaggctgaggcaggagaattgcttgaaccaggacctgggaggcagaggttgcaatgagccaagatcatgccactgcactccagcctgggctacagaacgagactctgtctcaaaaaaaaaaaaaaaaaagcaatggcgttggcattattgtggtttcaatggatctatacttatttaaaacttaaagtttaaaaaaaaaaaagtccatatgttgctccacatctttctgtactagttgggccattttgttgagttctactatgtggcaagtcaggatgttttgtgtaagtacaagctcctgtgactatagttttcatgcatccacatatctactaattagctccacaactgggttctgcaatttcctgggccacatcgctgagacagattccgcatgttctgcaccagcagtcatttccccttcatggagcccacatagtcacttaaaagtaatttatccaggagggtttccagcttttaagtgagtctgctaataacagaggttgtctgacttcacaatcaattatcctgcatagattcaagtgataatttctatatttgtagttttcaagttgcagggaaaaactgggaagggagaagaatatcaattctgcaaactggttattgaaagtattgggggggtttgctgaatatggtgattttgatggaaaggaatcttaacaataccccattcatatgcattttccaattgaattatggaagaaaaattaacttagaaaaccaagcaagcaagcaaacaaaaagccccaaacaacagcagcaaaacccgacttccaaaaagagttcacattataggcttacttttaaaaactgatctagaaacaagaagctggtttctaagtttatttccacacttgccctctgaaccctgtcttgttgaaagattcaggatatcagattctctcccataatttcctttcaacagaacttactgtattacccacccatcccccaaatataaatggctaaaacagctggctctttcagtcttggtgtatacacacaaacacaaatgagatacacacacacacacatgtatattatacatctctgcatatataaacacatactttggtcatttatttttttaacagaataaaggtaattwatcaaaatacaattcattttaatagttgaggcttgacagagatcattatttcaagaaaagccaaggagaataagctccctttcatagtattgttttctttctaaacctctatagggtgcatggctcttaactactgagaaagtttgggacagcaccatggagcagcctcctggcctacatgttaaaagatctaaattctcttggggaaggagcttataactatgtattcactcaccccacagaagagaagattttgcatctgttttatttctaattctaggctgtctctagttagccatagggcaaaaaaaccaaaactatttccccctctttccctgaagaaaaaaactgaagtgcagagagagaaataaatatctttttcttattccagttcaatttagtttcatttgttcttttctttaatattttgtgagcggagaagaaacatctttaaatcatctcatctatgtgaaacctgtttttagagagtccagactttttctccttcattctgtgattccatcagtgatgctgaaatgactgatttataattctccttcctactgactgggaaatagaggtgtatcatagtggagggaccaggaaaatggataggtagatgaaagagaaccagaggaccctgtccacaacccacccacccagctgaggactgttagctggtccmtgaatagaatgctctcaccctttctgcctctgcatatactgctctgctacagagccactcagcagagtggtrtccccttgacccagttggggccatcccgggactcctgtaacctaggaccttctagccttaatcatatcatcatatgtaaagaatgcctacaaatcaataaagaaaaatagaaaaatagacgagggatataaactggtgatttttagaagaaacctgggcattcaactttacaagtcattaaggaaataaaaattaatacaaaaatgagatcccactcttgccatcagtttggcaaaacaaaacaaaaaccctaaatgttggtgagcatataagaaaacaggaactcaaactgctaatggaagacgaaactggtaaagccactttgaagaactatctggcagcctctagtctgatgtgaacaggcacaagcactgcagcccagcagctacacttctagctgtgagccttagagatacctttgcttcacaggtaaaattatgtacaacaaaggctatatttatttttatgttttaaaaaggccagaaggatgaacaccaattttttctttttaaaattaatagataacattgtacrttataatcatatacaacatgatgttttaaagtacacatacattgtagaatggttaaatctagctaattaaacaaatgtattgatcacatagttaccattttgtggtaagagcatataacatccactctctacatttttcaagaatgtaatatatttttaaccatagacaccttgctctttcataggtgtcttgaaatttattcctcytgtctcattgcaattgtgtatcctttgaccaacatcttcccatccccctctccaccacaccccagcctctggtaaccaccattctactgtctacttctatgtaatcaacttttttggattccacaaagaagtgaaatcatgtggtattttgttttctgtgcccggcttatttcatttaacataatgtcttccaggttcatcyatattgtcacaaatggtggaatctcattcttttttatggctgaatagtagagtcaaccctagaaaaatgcagggatgaggggtgctaaccctcacacagtcagaaatccacaaataccttttggcttctccaaaactttattagcctactgttgattggaagccttactgataacataaacagtcaacacatactttgtatattatatataatatatactgtattcttacagtaagtaagctagagaaaagaaaatgttattaagaaaatcataaggaagagaaaacatatttaccattcattaaatgaaagtggatctttgtaaaattcttcacccatatcgtctacacattgagtaggctgaagaacaggaggagctggtcttgctgtctcagaggtggcagaggtagaagaggtggaggagtgtagtgggagataggagagacaggttggagtagctttattgaaaaaatccatatgtaagtggaccttgcagttcaaacctgtgttgttcaagcatcagctgtgttccattatgcatataggccacattttttttatccattcatctgttgatggacctttaagttgattccatatcttggccattgtgaatagtgcttccataacatggtagcacagataacctctccaaattcttggtagtggttgtcactggaggaagaaatgtgattggcatactttacttgatatatcatgtgatatataggatagatatatattttatgatatataggatagatatatcatatattttatgatatataggatagatatatattttatgatatataggatagatatatcatattttatgatatatatacacacacatatataagtattatatatgtttttatatatatatataaaaaaacaaacaagaactgaagaaaatatagaaaatatgttggctgggcacagtggctcatgcctgtaatctcagcactttgtggggccgaggcaggcagatcacttgagatcaggagtttgagaccagcctggccaacatagtcaaaccacatctctactaaaaatacaaaaattagctgggcatggtggcgggtgcttgtaattccagctactccggaagctgaagcaggagtatcgcttgaacccaggaggtggaggttgtagtgagccgagatcgcaccactgcactccagcctgggtgacagagtgagaccctgtgtcaaaaaaaaaaaaaaraaaaaagaaaaaagaaacagaaaatatgttatatttttctctgtacttttctgcatttacatttttctcaaaattaaaaaagtagatagccactctttcagttgattagtacaatcagcatactttagtctcttagtaattttctgatttgcatctttgcagtccctaaacagtctttcctctatgatactaacaggtttcactgcaaccagctcaccttcctggatctggttttaagcttggtgaaggcagtgctgataaggtctgacaatgtggggagtggtagaagaggcttggaatcttttactgtttttcatagcatttcagagagttggaaaatagcttcagggatcatctaatagaatttatttatttaaatgaagaaattgtggycttgagagccttgttcagatgcacctggctaattaaaggtagagttagaatctgtaactactgattttctagtaacaagagcagaaagttctacagagccttccccatggacaatcaggcacccaccatgggtttggtattttggaaatagccattaggttagcaatactttaagggactagaaggagaggttaaaagtctctgtggtcactacattcaagaagcagtatagcataaaggctgagagaaggtttatcagaagccatacttgcattggtgtatatcttggctctgccacttccagctgttttatcttggataagttacttaacctgtctgtgccacagtttctttaattgtaaaagtaacaataataatagtacctatttcagaggttattcggagagttaaaagagttaataatatgtgagaatgatgtctgatatataatgtattcaacaaatgttagctattattatttcatttggagaacaagctattaaggaaactgaatgtttaattatggttctgccatcttttgctttaaaccacttatctctcaaaactgtcctatcttcctttgtatttaacttggatgagtcttggttttacaataaagaaagcagaattcaaaaaggtaagatcatttactttcctagaatgatgtcatacatctgtggtaatgattatatttccttttcattatatttcactcaacacttattcatccctattggtatacatgggggctacccatgggagatgtgaagcaatctagttgacaaaagaaataaaggactgagtccctgggggtgttactgtccaatacatagattgctattttgatgcgctctgatcaattacaagcaaattcttcaagtttttaaacaaattacactccaaattcctacattttgacaaaagtgctttgaaccttaatataaaatgatgatagaattctacttgccaccaatgcatctattaaacagtgtaggtttctaggacccaaatcagattttctttctttgtatcagtttcttgaaactaatgctataatcctgatgtggcttttagacaccaacccattcaatggtggagaattcattcccagggtttgaaagacagctaaccatttctttgtttgtccccagtgcttttaaccaaataatgtagttcttaaaagatgcatttatataaggtagaatactctacatttcctttttatggttgtttaaaaatgtttttaacaaacattacagtaatttttctcatctacctcagaaaagttccatgttctaactgagatgaattcctttgtcaaactagtaagagggtgatttcatttgtagtttacttactaatttattccataatttgagtgttaatcttgctgtcagatgaatataatcaacttttggactcaatttcttcctgtggaggggagaatttctgtgtaccaaattcccacataattgcctcttttgcacacacccacatcttatttttgttggtgcctatcctagcccatcgcaacctgtaattgtccagctaaataatttttttaaaagatttgatgctttcaggtaccaaaatgattcagatttaaagctgcagtggatagtttattgatacatgaattaaacctgaaataccccctcagaaccttaaatctcttttcaggacagatgtctaaagttgaccacagtttttctgtgtgaaagtagatgctaaaattagccattgtagcatgcagctttgtggaagtggctgtactcttgcatcctgtggttctttcttccctattggcatggttattttgatctgaaatgtcctttttcctttgctgtctagctttctgctgtctacctattgccattccatgggccataattctcaggtggaggtttttaaaattttcccttgcctaggctatatcccagaccagctgaatcagaatccctggggacagagcaggggtatttgwgtttttaaaacctcttcaggacattytgatgctcaacctgaattaagaaccacttgcttattgcctaggttagaaatttttatttgttttgttttgttttgtttgacaggatctcactctgtcccccaggctggagtgcagtgacatgatcacagctcactgcagcctcgacctccttggctcaggcaatcctcccacctcagcctccttagtagctgggactmcaggcctgtgccaccacactcagcaaattttttagtttttgtgttttgttttgttttkttttaagagatggggtctcactatattgcccaggctggtcttgaactcctgggttcaagcaatcctcctgcctcacactccgaaagtgctgggattatagtcatgagccaccgtgccaggcccaaaaatcttttatttgtaaataactgaaacccaaactatcttaacagcaacaaaacaatttgtcataaggaatcacgagactctcacataacccaacagcatgaaatacaactggacttcataagagaccagagcctggaacaggagcatttacaaggacccaggcaactagtccctgttgcccaggtgtagctctctgtctgcctggctcccttcaggggcttgtggattcagatctctgcttctctctgtacatctgctttctttcttttctctttctcagctagccactttcgctgctgctgagcacatggccaaacatggtgcatcctcattacccacatttgtacgtccttagttcgacttcccagcccagggagactagcatcaatgaatctaaattcctgagagaggatctgatcagtctggcacaggtgatatgtctgcccttaatccaaccagacaacatggcttaaacatggctgccaagggcccacccatgtgtaggttaagwttggaggctatttagctatctcaaagtgtatctttatgcttgccatattttttttcttttttgaaggaaattttgtattattttaattatttttatggacagaaaactcaacagtgtacatttaaccsagttcagtggcaaagttctttaacctttgccttttcgagcttgataatgtgagctacagacttgagacccaggacattgcctccccagtgacagtggatctcatcgtatctgtcgtagttggtcctgatagcttccaccagcttagccaaagctcctttgtcttccgagttaacctttgtgaagacaacagtggtgcaggtcttcctgtggactagatgtcccagtcttgccttccccttgataatgcagtaagggaccccctttttacaacayggggcaggcaggcagaagacagccagctcgatgggatcgacatcgtgtgcagtcatcaccagctgagctttcttgttctccaccaaggtggtgaccatgttaactcctgctcgaaggacaggtggtctcttagtggggatgtcccctttgctggtagctttcttcttggcctgggccaacagcctctgcttcttctcttgctttgtctctggcctgtacttgtgggccagcttaagcagctgagtagctgtttggtggtccagggcctgggtgaactggttaatggcaggaggcacttacatccacttacagaggatggctctctgccgctgcaacctgatatagtggggccatttcacaaagcgggtgaggtctctttggggctggatatcctgtccaatgccaaaattcttaagccttttctcaaacaggggattcaccacttccttggcctcctgcttctttatgacagcaggagctggagccattttttctccttggctttctttcctttcagcatcttgggtggcgggaggagagacttatggttgccatatttttcatctagcattataccaaataactttgtttctaatttcagttttattgatgatattttcgcctttaaagaaggtgaaaagcaacaattttcatatatcaggggtgatttaacgttacagatgccactaagatgaacattgaatgtactgttctctctctaagcctagttcttcctcttataaatagggatcagtctaaatgttgagaaaattagagaattgggaaatctgcctctcctaagtagtaaaagttgaaaagtagtacagtaagatagcaatctaatagcacagtcattttctacaatgtatataattttaatcatcacaataaagaatgtttaaagaaattgaggtagtttaatcataggcagtgctgagatgtgaccatataatgatcttttagagagaaggctgctactttttctttgtctacacaagggttaaaaaaagaagaaatgtttttaggaggaatgtaacatagtgcctggcacatggttagtattcaatagtattttactaatagtgtttacttagaaatatttatcagaaataacttcaaggtgtctttggaccgatacaatgagttaccaaggaaagtaaatacatctttccttcttcctttttttaccattaaaggaaaccaaaatacttcaccctcaaatatacttctttgacatatttgagatggctattcagagaacctgcagacaggaatagccctgtaaaactaccttttgtgggggagatttacatctgtagagaaaatctacattgctgaaataaacagccagcctttctgtgctgtgacttgtctggatctaggacagatgggctcctgggagagagrgactgagagtttgacacctctggggatctaatagaaacttactcttttggagggctgctacctgtgaggtttcatctgcattacaagactgcctttgctagccatgcttttcttctcttccacccataactggtcttgccagactctaagcctctattccttctgyaacctcaggatgaaaacttcaactatctgaccctttctttgagtttttcttattttttataactcctgtgcacatgcgtgcatattactatttttgtatgccttttttcctattaacctgccttttgtcagttgattttcagtaaacactcagaggttgaaggggaggttttccctaggctcctataccatcttgcatatttgggatatcccaagacatccatgacgcttggctctctaggacattgaaatctggttagggaagtaaaatatgaaagcaatggagaacagtctgcctttggcactcagagatctctagatgttttcacttgtcccatttcatccttataggttaagaagcagggaaatagagttcattacaatttcaaattataattttgctgatattttccccttcagggaaggtgagaagcaagaattttcacatatcaaaggtgattttaccttgaagatgccactaagatgagctgggcagagagaatgttaaggcaaagcacaatgttaatgactaaattagaactgaaaatgaatttaatctctttaaagaacaagaatcaaggtaactgtatttcagtaatgtgtaatgcaaaaaatgcatgatgaataaaatacatcatagaaatatgaagggttgagttatatgcaagtatattataggaaaaattagttgatctgatactgtatcagagtagcttcatcattaaatgacactgtgtcatttatggaatcattggcaattcctagaacatctattacagcactaaagtggtcagggttttcataaagttttgtggaagtctgaaccttattttcttaggtcaaagacatggtagaagcaatttataagtaatgttttattaataaagtgatttctaagtttatgataaatacaagtgacagatccagtggaatttattggctaatgtaattgcgaaggctaagaagtggatctaatgggtttccaacaatgtcatcatcgtttctgctgtaattccatctctctgctctgctttcctcctgttggtttcattcgcagcaggttttgccatatgggaggagcaatgcagcagtctctggtccgtatcacttaggatctcataaggcataaggtcttttttctctccaactttgtcagtacgttcaaaaagagtcctattggcccattagatcttttgtctaccccagtggcaggaagacagggccccagaggtaggggtggagcagttctccaaaggaaaggaaggtttcagttattagaaaaggggtggaaagaatatatgtccaccaatatatcacacaactgcatatagtgcactttcacatcctgtggcaaacaaaaatctttcactaatggaaaggaaatgatggcttgacatattgtgtatagtgtaagaaaaaaaaaatccagatgcttttttcatattcactctaattccctaggttacaactaattagtacttcctgtttgctccccatataatttgcttaccccttgactctatcacrtgtttatcttccttctagaggcctatcttacagaaataggatgtgaacacttgaagacagaactttgtcttttatctctttatttccagtgcctagtccaatccttggaacacagaagccacttgatgcttactgagtggaattaaattctatcctatctactgcttatattaggaaagaaaaaaaatttactagtcaagggcttcagggggaaagtctttgttctctaggaggaaggattttccctaagtcactcttggcctttctgcttcttcactgttcctccttagggaaagtggaatggcttatctaactggtgagtctgagataaggaagcacttcrcacattcagatattgtcctccaccagccatagagggacgggacagggggccctgcctaacccagttttggggaagctcactgttgctatgtacccatgccttctctctctctctttctctctctctccctctctctctctgtctctctctttctaatgaagagtttagctttggagttaatgagcaaaagatttccttaccataaagtgaagcccatcaagtgaaagcaagtagaaaggcgcagaaaggtttatccttgtcaccatgtggaaggacacttaggggagcagatcatttggtaactgttggtacttgtggcctctacatcttgtaaattcatacatgtccacgtttgacctaattgtagacttttttgaaattttcagttttaggtgaawaccaatgagtacccagagttttctgtctttgttgtcctctggatgttggtcccaaatccactcaggcaacaaatcctggagttacctgctccttatctttaaagtatatgtagcccttggtctccatttctgctgcctttttttttttgcttatttttaaatttaaaattgacaaatacagttgtatgtatttatgggcacaatgtaatgttataattaataaatataatatgggataattaaatcaaactaattaagatatccatcgctccaaataccagttttgtggtaagcacatttgaaatttactctcttaacaattttcaaatgtacagtacataattattcactatactcgccacacaatttgagctccttatatattttggatattaaaccctaatcagatgtatgccttgaaaatattttctctcaatccaaaggttgtcgcttcatgcagttgttttccttgcggtacaggggctttttattttgatataatcccatttttctatttttgcttttgttgcatgaacttttagggtcaggtctaaaatatcattgcccagaataatgttgtgtaattttccccctatctcttttgacagcctacaatcagatatatgagcaaagaaatgatttaaagtttgaacttacatttaaaagggaagcagagtgtaaaattttggataatttgcagcctggctatgtggccagagaaataaaaagcatttttaggagaggaatacaagcaggctgaggaacaaccacttgcttagaaagattagcgtgactaaaagggagccaagtgctaatttccaagacaatggggaaaaggcatatcagagatcttggagacagactctgctatcagacccagagcattatgaggaaataatggtttcagggaccaggcctgggccattgccctgctcaggcttgagacactgctgtctgcatgtgggctgcttcagctccatctccagctccagctcaaagggccccaagtacagcttgggctgctggctctggagggcacaagctgtaagctttagtggctttcatgtggtattaagtctgcaggtgcacagagtgcaaaagtgaaggaaacttcgcagattcccctagatttcagaggatgtattggaaatcctgggtgcccaggcagtagcctgctgcagaggtggagcccttacagagaacctctactagagcagtgtggagaggaaatgtggagttgaagccccccacatagagtcctcaccagggcactgccttgtggagtgatgggaagagggccaccaccctccacgtcccagaatggtagagccatgggcagcttgtatcctgagcttggaaaagctgcagacactcaactccaacccatgagagcagtcatggggtctgcatcctgcaaagccacagggacagcgctgcccatgcaccagtgtgccctggatgtgggacatggagtcaaagatgattattttggagctttaagatttaatgactgccgccgagcgtagtggctcacgcctgtaatcccagcactttgggaggctgaggtgggtggatcacgaggtcaggagatcaagaccatcctggctaacacagtgaaaccccgtctctactaaaagtacaaaaaattagcacggcgtggtggtgggcgcctgtagtcccagctactcgggaagctgaggcaggagaatggcgtgaacctgggaggcggagcttgcagtgagcaaagatcacgccactgcactccagcctgggcgacagagcgagactccgtctcaaaaataaataaataaatagcctgggtgcggtggctcacgcctgtaatcccagcactttaggaggccaaggcaggcagatcacgaggtcaggagttcgagaccagtctggccaacatgatgaaacccagtctctactaaaaatacaaaaaactagccaggcatggtggcgggtgcctgtagtcccagctactcgggaggctgaggcaggagaatkgcgtgaacccaggaggcggagcttgcagtgagccgagatcatgccactgcactccagcctgggcaacagtgtaagactcaatctcaaaaaaaaaaaaaaaaaaaaaacaacatttaatgactgcccttctgggtttcagacctgcatgggaactgtagcccctttcttttggccagtttttccctttggaatgggaatatttacccaatgcccatattaccattgtatctcggaaataaataacttgtttttgatcttacaggctcataggtggaaggaactcatctccagatgaaactttggacttcagacttgggacttttgattgagttggaattggaacaaattaagacttgggagaactattgagaaaggatgattatattttgcaatgtgagaaggacatgagatttggggagctagaggcataatgatatagtttagatatttgtcccctccaaatctcatgttaaaatccccagtgttggaggtggggcttggtggaaggtgttctgattatgggggcagatccttcatgaatggcttagtccatccatttggtgatgaatgagttcttgctctggtggttaacatgaaatgtggttatttaaagagtgtggcacctccccccactcttgttcctactctcaacttgtgacatgctagcttcccttcacctgccaccatgactataagcttcctgaggccttaccagaagctgagcagatgccagcaccatgatttctgtagagcctgcagagctgtgagccaattaagctcagcgtcaggtgtttctttctttttttttttttttgagacagagtattgctctgttgcccaggctggagtgcctggaggcatgatctcagctcactgcaacctccacctcctgggttcaagagcgactctcatgcttcagccacccaaggagctgggattacaggagtgtgctaccacgcccagctaatttttgtattttagtggagatggggtttcaccatgttggccaggctggcctcgaactcctgacctcaagtgattcacccaccttggcctccaaaagtgcatgaggcgtgagccactgcgcctgggcagttatttgtttatagtgatgcaagaacagactaacacaaatgggttcagaatgcagttgtggaaaaggtgtataatttaatagtcccctcaaacctcacagaagaatttcagaaagatcctatatttgtttttgaatgcatgcagagaatagattaaaatataaatatcttgatgttttttatattacatatttatatcccatctttttccaaaacagatttaaagtggtttcatctttgacatggtaatctaacccatgacattcaaaagccacaaggacagaaaaagaattttctaagactgcctgaagcgcaacttcatttgatatgatttcctagcctagaatataatcaggaaggyactgatttctttctgttactgttgtttttaagcaaaaaagatcccattcctcctcttctatttctttgcatggtgaatagctycgctagttacccagccactaaacaacaacctgggaatcaacttcctctctattctgttgccccttcccccaaacaaccactcgatcatcaagatttcttcctcgatttcatgttcagctctacatccagggtctaaattcacaccttggatttctgctgcctgaactaatccagcagtcgcactctgtagcccttcagtccctcttctgtagcatgtccaaagtgttctttctagcagaacaatgtgattgtgttactcttgtacttgaaatccctcaatgtctttttcactgtctctgggatttattccagactccctagcatacatacagggacctcaaggtctggcagctgctcagttctccagccgtatatctctgaatggtttctctctcggcctcatttctccatcacccctcctcccagtaaacacatacactagaaccattgtgaatttctcagagtacttcttatggtctaggatagtttacatttttgggtcccttttgctgctcctctgcctataatttatcccttcccctcttgccttccctctaccccccaaggctggctcagcttttaagactcaatcgaagtgccaccacctctctgaagcctttttcacacttcacccttaggaagaatgaagcatcttcttcctcttcttcccttccatgtctataatcctcaacacattttttttttcatgaattgtctgcaacactgtttgctttcgctagactgaaagatcttagggacaaagtccaagttatgctccttctgctgtctctaatatctagcatcattcctgacactttagcagtatttcataaatgtttattgactaaatgcatatttacctatgcatgaaagagtaacagtttcagagtttttgttagctgcattcctttacttcctatcagtttggggaagtagatttagtatccacaaaatgattgggggtcccctgtactgcaaagatttgactttaagaagtaggtggctgggtacgatagctcatgcttataatcccaacatattgggaggccaaggcagaaggatcgcttaagcccaggagtttgagaccagcctgagcgacgtagtagggacccattccgtatgaaaaaccatatatattagccaggcatggtggcgtgtgcctcccaaattggctgaagcaggaggattgcttgagcctgggaggtcaaggctgtagtgagccatgattgtgccactgcacgccagcctggatgacagagcgagaccctgtctcaaaataataataataaataaagaaacaggcccgtgaacagcatcagcagtttcagctactaatactagcagtctttgttcctcttagagtgcagagagctgctggtcacttttgatctttattaaaacacccatacacagtaagattgcttgggaatccaaggcagaatatatctgtgtggtttgagagaggactttaaagtgttagagagtctaatcttagagcacactaaaaagagagtagatacactaccccagggcagagatgaaataatgaatttgctgaatattccatgtgggccctgaacatcaacagggcaagagagaagtcaagaaatgaaaagtgctggtaaggtcagcaagtacctatcttggcacccaatggtaccaagtgaccattgcatggaccatgctctgggagggcatgagaaaaattaagggcaaaggacattccctcaaagagtttaccagtttaaagctttaatgtcactgaaactaatatgtcttctgtgacaagctttgatgataaatgtagactaagttttttaaaatcatataaaaatttaaaatactttgcaaagcacaaacaattttcttaggcctgccttggtagcaagaacagtttgtaatgactaaaaagtgaagaatctatggtatattcatggtctaaatcagatattgcaagctggtgccctctggactggagtcatacgatattttcaaattcaggaaattttaaataaaaattaagatttcttacttgtgatttccttgtgctctcaggttaaaatggtttatgcaagacttgatggtttgaaataaaattggctaaatggattctagtataaatgcaaaggatatttaactcacttgrgagctcataggcataatgcatatgtttgtttaaaaacaaaagaagcaattgaagattaacattgactttgtctcgcctggcgcggtggctcacgcctgtaatcccagcactttgggaggccgaggtgggcggatcatgaggtcaggagattgagaccatcctggctaacagggtgaaaccccgtctctactaaaatacaaaaaaattaaccaggcatggtggggggcgcctgtagtcccagctrctcrgrargctgaggcaggagaatggcatgaacccgggaggcagagctttcagtgagccaagatcctgccactgcactccagcctgggcgatactgactttgtctcatagyttagatctgggataaacaaaccttttctgtaaagggccagaatattttaggcctttatttattttaggttttgcaggtcctataatctctgttgcagctaaacagctctgccactgtagtgtgaagtcaccatagatgatacctggacaaatgagcatggctgtgttcaataaaactttgtttatgaacactgaaatttgaaatttatataatttctacatgtcacaaaattttttttgtctttttttcagctatttaaaactgtaataactattctgagctcatgggccatataaaaacaagagatggacctcatttgacatataggccaaatggacattggctgagtgtcattgtaaaatcttggtcttaggctttttagacctgattagcctaaaaggaacaaactagaatgttctgttctctttacagggcaaaggaattctcctttccctactttttattttttattttttcattttttttggatggagtcttactctgtcacccaggctggagtgcagtggcaccatcttggctcactgcaacctccgcctcccaggttcaagcaattcttctgcctcaccctctctagaagctgggattgcaggttcgtgcccgacgcccagctaatttctgtattttcagtagagatgggttttcaccatgttggccaggctggtctcgaactccagacctcaggtgatccacccacctcggcctcccaaagtgctgggattacaggcatgagccaccatgcctggcttccctacttttttatatccatggggagcttggttgatatcctgcttgaacatggaagacccaagttgctcaccctgtgttttccaaagccttaaaggctagtctacatttcagacagcccaggtgatgagggagccttgtgttttctgtgaggaaccttatcccttaagcatctatatcccagtcatacttatgcatggaaaggctaagtaaaatctattaatatcctagctagaaagaaaactataaaattacacatagatgcaagcttgtgtgtattctgcagttcaaagtgtagtcagcaaaaaaagcatacacgctatcgcactgggaggaaatcggtgtctttgaaatcaaataccctgccattggcatatccaggcttgaaactcagctgcagcttttagcttccaccacatgtttacattggaaatctctctgtgcacatatagagtttgttctcttatgaaatcatgtctctagggaaggataatttaaagccatttccgtttgttatgtctgagctgaactagactattagggcttgttaacgctggataaacttgagccctataactgccttcatctgcagattatagaatctgtccaacaaattgcattctgatgttttcagaatgatggctaagcaagcaagggccttttaatttatattctatcaccatggttgtcaggaatcacagttttgactttcatgcttacttggtatagcagcgatgatatgactcttgaatggaccaaatccagaagtaattgagacactaaactgcatctgcatgttactatagcagagtgagcaaaggctgacagtcagaaaattgctggtgaagcatctttcttcagagtgcctcccttccccgagtcttagcataaatcagtgttaggtccactgaaatatcgtgtgtggtctgcatttagaaattttatttgaaaatgagacagatggataaatgaaaacaagttttctttaggctagtgttaagtaaatagaattaagtgaagatagacagtttccctgatttagtggaggggagatggtggttgccccaggatatctaactccctctgcctctattcatcaaatccactgaacacatttgccttcagtttggcttaatatcattcaccattttagatagtgggatactggaaggtagaaattacatctgtttgacttcttttgtgaaccagtgtagcagaactaccagtacaacttaagtaaaatcacaaataggatggcaccaggcaatagtgtgactatccaacatggcatcccctagctgggaaaggaatcctttcttcatggctctggccttattttcagtagctccactgaattcacttcttttcaataaacttgtagaaggtactgccctacgccctgaggttggggacagtggcagtggtaggatacagagacaagtaagacatagaccctgcccaaaaggtgactgtatacataaagcaccctaatccagaccagactcaaagaatgctagaaatgaagggcagacataggacagtggcattttgagtaagaaatagggtttcaactggtgggagaaagaagaacctgctagactaagggaacagcatgaactaaagaccagaagtagaaaagtactactttttgtaccaaaagtagaaaagaccaaaagtgttgagggagaatgggaataattcctctctctctctttccttttttccctttattctttattcaataattatttgatgaatgtttatggtaaaccgaacagacacagctcctgcccacacaaagcttacagtctagaggaggaacaaccaggaatcaaagaagcccaaagtaaataacaaattacagccctgacccttacctcaaaggagaggggtacattgactaagagagcgcattacaggagagtggaacatactttacaagcctttactggagagatgtcctgccacctgaagagagaggaggcattgattagaggagagcgctctatggagaggagtcagcgtggacactgagactgcaagagtgagggaatgtgcgggattagaccacagtcagggagcagaacacagtggggtttttggtctttattctaagagcaaagaaaagctattgacctgtttctagcaaaagatggggtaaggtaatgagatttgctagttggaaagatcccactagctgcagtgtagagaatgaattagatgggtgaagagggacccctgccaggaggcagatgcaattgtccatgggggatattctggtttctttgcactggagtaatgaggatggggatgaaaagaagggaatatgtttaagagctgataatgagcttggccttggcaacactgagtttgatgcacctttgagatactaaggagacataccaggaagatataggtgtactggagctcactgaagaggtctgggctggagataaacaattgagtcatctccttataggtgataattgagccataaaagtggataaataaatataagttgaatgaatgatagaattaatgaatagatggtattgggtgaggaaagagcacagagtaacgagggcttaaacaackttgtggtgctgtatttctgtaactattacttatcagttgtgagactggacaaagtgattttcctctggccaggtctgatgcctcctatggacacattctgaaagccagcaggaacctagaaagtgaccaggccacccccttgcccacatagaaacatgtctgctaactcttccaccttaccaataggtggattccaagagttcacataaaaggtggttgtttggattgtagaagtctcttcccaaaagaaactcctaytttcctagggagatgccaccatagaccctaattaaccaaggtcctttctgtgagacattatgttcaataggaccttgaggtgttacaaactatttcctcacagatgcctgggcataggcctggactcttccccagaatcctcccatcccacttgccaggcactgagaaacaggactttccacttgtttgtcactggcaaggacttcatggcttcagagagggagctccaggggtttctgggacacttaccagtataaattccctgaggttcttctaagtctgtgcttgaattcattcattcattcccttcttatcttttctgaggaccccaagaattggcctgcctgtgtcctttgcttttacttgcagcaggtgggggtctggcacggtcgggggaagggttttgatgggaaaagtgaggctggtactatttttcctcccatgtttagcctatagagtatagtcataaaacttttcctcaatgtttcagtcctgaagcaagcgcacagctcattggaagtttctaaggatttttattattagcaatgtcagaaagcaagttgaaagcaaaacagccccctctgggcctcttccctagcctttccttattttgtgttgctttcctcacacccaggaggaacacatatcccaattcctgaggacagtcctgatttgcaactggcatcgtggcacaactgccaatagtaccacctttaaaaagtttagacactgaattatggtcatgctacttaaccccataaagaaaaataaagtaatgcattgggggtaatagtggatttacaaaagactacaataatctcgatctgcattttagcgagaggatatgagccacagagtgatttctttggtattttgtcccaacagctggactgggcctctatgtgtgtaggtgagrgatggggtacagagaggaggacttgtgggaagtgctggaatatcagggctagaatattgccacagaaatgtgtctattttttctcctgtctctttctcagtaaccagatctaccttggaagactcagactggcactttggcaaggtgagatgaaaaatcagggctgaggaaggtgcatttgcaggcactgtggggtccacagcagagaggataaaaacgtggaggcagaggtgcatccgagtcataatagcacagagccgggcgttggggttggggcctgagccattgttgtctggctgtcgcagcagggggaaaggaggacagaagtgtcaatgtttcgtttagaatttttctaaaaagttgccactttgggtgaagggctcagtaagaccttcccctccacactccacataactatgcttctattagaagtattctgagcagttcaggccttccacgtggtggaactgtgtggggtaccctcaagcccatgggtctctaggggttgtgcctaagtcacatgtatacgttccacctgtgatgttaggcaagcaagcatatgatcctttctcatcaccacttccatgaaacaaagacattttagaactgttgacgatagcaatgttttctcgacaaagagattacttgtaaagtagtaaagaacattagaaaaaggagctatagtcatatggtcactgttctttgtggtgctatataggtggtgtgtatattataagaacttttgtgtcttccaataatgttttttggtttttggttttttggtttttttttttttttttttgagatggagtctcgctctgttgccagtctggagtgcaagggcacgatttcggctcacggcaaccttcacctcccaggttcaagcgattttcctgcctcagcctccagagtagctgggactacaggcacacaccaccacgcccagctaatttttactgttagtagagacgaggtttcaccatgttagccaggatggtctcgatcccttgacctcgtgatctacccacctcagcctcccaaagtgttgggattacaggcgtgagccwccgcgcctggccccaataatgttttaaacgagtaaaatgaagtttgtcacttctgcatgcttacaagcttaaacatcaaaagaattggccaggtgtggtggctcacacctgtaatcccagaactttaggagacgaagttgggaggatcacttgagtctgggagtccaagaccagcctgggcaacaaagcaaaatctgtctctacaaaagatttattttttaattttttttttttaattattaagaatccaaagagtttatacatttaggtgggaaaggtaacccttgggaagccctgggctagcctctcggcttgctcatgattcaagtagcaaaaagaagtagtggactcaggacagaattttgacgtgggagccccatttcaagctctgaggtctgaaatgccaagtttaagcctcttggcctcattgtgactcgatttccctttctgtgaaatgagaagataatcccagtattagggtactatccgagtaccttcaggctttttaggaagaactctagtgagtaagctctctggctgtagaggggaccgtgatgcacagtaaaaagaaccccatcttgtcactggagggatataggcagccgcccaatgggagctcccatactgtagagatggcactcttgctttggtgggactagtacagatgtattttttatgtcccatttcttatgttgcctattttttggagacatatttgtttgttaactctttgagtttcataaagaaaacattaatacaaattttattgagtggtaggttagctccaatatcctcaaaatagattgagcattttagaattcaccttaatgttacctggaatgcaaaaagatttgcctaaaacgtttagctcctcattttgttactggcttcattctgattttggaaacaacagaaagtaaagtggaactggggttttgggtctattagattctccaatttaatctcgcccatctattcctgatattaataaactctttctaatatcagttggccatggttgtcattctggtaaatacctccctggaaccggactgaataaaattcatgagacttgctggtcacagctggagattggttcagtggtttgggtttttttttctaccaaagtgaaaatagaattattgttattattgttttctagttttaaaatgactaaaagtacaaaggaaaaatggaaaagtcaatttaaatcctactgctgagagaaataacattttggtgagcaactctccagatcactctcagaatgtgcatattatacttccatgtgccattgttagaaaacaagagtgtactttctcattgtggacaactctatgtccataaataatgacaccattaattatagtgacagtatataatattccattaaacagctgtgctattatccatttatgcatttcccaattattattcatttaggtttttttatattgcttactatcatttaaaaattgcagtaaacattcttttacatccagatttccaaatttgtctaattatctcccaggttatatagccatatcttgaggatattgtagacatggttccagaccattgcaataaagtaaatattgcaataaagtgaaatacattttttggtttcccagtgcatataaaagttatgttggccgggcgcggtggctcacgcctgtaatcccagcactttgggaggccgaggtgggcggatcacaaggtcaggagatcgagactatcctggctaacagggtgaaaccccgtctctaytaaataaatacaaaaaaattagccgggtgcagtggcgggcgcctgtggtcccagctactccggaggctgaggygggagaatggcgtgaacccaggaggcggagcttgcagtgagccgaggttgtgtcactgcacyccaacctgggcgacagagcgagactccgtctcaaaaaaaaaaaaaaaaaaagttatgtttacactctactctattaaaagtgcaatagtattatattttttaaaaacaatatagattacctaaatttaaaatacttaattgctaaaaaaaaaatgctagggatcatcggagccttcagtgagttataatcttgctggtgaagggtcttgccttagtgttgaaggttgctgactgttcagggggtggttgctgaaggttggagtggctgtagcaatttcttaaaaaatgacaataggccgggcgcggtggctcacgcctgtaatcccagcactttgggaggccgaggtgggcggatcacaaggtcaggagatcgagaccatcctggctaacagggtgaaaccccgtctctactaaataaatacaaaaaaattagccgggtgcagtggcgggcgcctgtggtcccagctactccggaggctgaggcgggagaatggcgtgaacccaggaggcggagcttgcagtgagccgaggttgtgtcactgcactccaacctgggcgacagagcgagactccgtctcaaaaaaaaaaaaaaaaaaagttatgtttacactctactctattaaaagtgcaatagtattatattttttaaaaacaatatagattacctaaatttaaaatacttaattgctaaaaaaaaaatgctagggatcatcggagccttcagtgagttataatcttgctggtgaagggtcttgccttagtgttgaaggttgctgactgttcagggggtggttgctgaaggttggagtggctgtagcaatttcttaaaaaatgacaataggccgggcgcggtggctcacgcctgtaatcccagcactttgggaggccgaggcgggcggatcacgaggtcaggagatcgagaccatcccggctaaaacggtgaaaccccgtctctactaaaaatacaaaaaaaattagccgggcgcggtggcgggcgcctgtagtcccagctacttgggaggctgaggcaggagaatggcatgaacccgggaggcggagcttgcagtgagccgagatcccgccactgcactccagcctgggcgacagagcgagactccgtctcaaaaaaaaaaaaaaaaaaaaatgacaataatgaagtttgccttatggattgactcttatgaaagattgctctgtagcatgtcatgctgtttgataacattttatccacggtagaacttctttcaaaattggagtcagtcctttcaaaccctgccactgctttgtcaactaagtttctgtgatattctaaatcccttgttgtcatttcaacattgttcatagcatcctcaccagtagattccatctcaagagaccactttctttgcttatccaaaagaagcaactcctcatcatgttttgtcatgagattgcagcaattcagtcacatattcgggctccatttctaattctaattctcttgctatttccgccacatctgcagtaacttcttccaatgaagtcttgaacccctcaaagtcattcatgaaggttagaatcttattccaagctcctattaaggatggtattttgacctcctcctatgaatcacgaatcttctgaatggcatctagaatgctgaatcctttctagaagattttcaacttactttgcccagatccataagaggaatcactatctatggcagctatagccttacaaattgtatttcttaaataataagtcttaaaagtcaaaattactccttgatccatgggccgcagcaggcatgaaaacaacattaaccttgtacatcttcatcagagctcttcagtgaccagctacattgtcagtgagtagtactattttgaaagagatctctttttttctgagcagtaagtctcaatggtgggcttaaaatattcagtaaaccatgctacaaacagatgtgctgccatccattccttgttgttccatttctagagcacagacagccattttcaacatgccttcctcactaagcttaatcatttctagctttaaagtgagagatatgtgactcttcctttcacttgaacacttagaggccattgtagggttaattggcctaatttcaatgttcttggcctaatttcaatgttgtcctgtctcaggaaatagagaggcctgagaagaggaaaagatggggaagggctggttgttggaaagtcagaatacacacatttattaagtttgctgtcttacagaggtgtggttgatggtgcccaaaacaattacaagagtaacataaaagatcactgatcatagatcaccataacagatataattataatgaaaaagtctgaaatagtgcgagaatgaccaaaacatgacacagacatgaagcaagcacatgctgttggaaaaagggtgttgaaagacttgtcaacgcgcttgccacaaacgttcaatttgtagaaaaacatagcatctgcaaagtgcaatacagcaacacacaataaagctagacatgcctgtactcctgaagtgatgttgatgatcgatgggtccgaggcatgtttcagtttttgtatgtattgcaaaactacctgtcaggaatgtatcagtttgcatgaccatcagcagtgtttgtgaattattggtcccccacactattgcctacactgcagctaattttttttctcaatctttgtgagtctcttgagtgaaacaatatcttactgtcatttatgtttgctttactttgattactagtgagatgaagcatctttttgtatgtttattgcccacttgtatagtatttctcctattatgaaacagaataggtcctgtccaaaaactctaggaaggttatggtctggttggtccatggaatgtaggatctggactgtaaattattcttcagtcagatcgtgtgatataaaagcctatatcacacaatgtgtgatggtaaagaaattattaaaaattatttgaaaaatattttaagaatagcttgttttatgattatatcatggagtttgagtatccttaacaaaggaagaaattcaccatgcttattggagacatgtaatcctagagaaggtgggactgggccatgcccctctgctgcagtaccagcacagaatgacagaattgttggaaacctctcctaattcataccaccccacagaggagcagctgccacagtggagcacaccccacctgcttggaggtgccataggccagcctctctgagttttatgatgcatctgaaatggagttttactgcatcctcccacgaccttacgaaaaaccacgggggaggaaagaaaaacagaacccaccaagaggagcaagcagacctgtccgagggtggggaattggctactccataaggcagcaggagagtaaactacaaaagacataaagcacaccttgctttaatcccttccatccgcccagagcccccagaaagctcataaagtctccctttctgggtgattggattcctttagctcaggggcaagtagggcatttttttggttttgttttggaagagggctgggtaaaggagaatggtaatcactggggttggaggagggagaatgaaaacgggggcaatcactggggttgggggagtcccttctcttcttgcttcgaggtagtgagtgggaaacgcaaacagctgctgcctgaaatcacagcgcgtgggtactgggcagccagaccagatcagcagccattaagcagggcccacagttcctatgrccgttacctctctcagaagccaggcagagctgtgagttctttcaccttttgagggctcctcttggctacctcaaaggaatcatttggaatgctgctggcaaaaacgttgctgaaagttgtgtgttgtaggggggcagtgttttttctctctctaaaaagagtggtggtggttctttgccaggatttagaagccagaactgtctgtcctttttgtttgaaatagagactttagagactagtcttttcgtttactgaaagaaggagaaagaaaggaaaaaaaatttgtctactttgcctttggtctgggtactttccacttgtttgcttttaacctttctcagtgtttgcagggtgcagggaaacggccttgtcagcctgggctgggctccttaagtcttgaacaacaaacacttaaaataatcaaaatgttatatttggcagttaaaagaagaatctcctaaaactatgtctagtcttatttgtttctgaactcctggtagaggcggggagaccatgttctccattctgtggcctagccactcttccgggccttctcttgttcctcttcactccctcttccccagatgtactcctagactgagctgcttcccagctcagagcccaccacgtgcctctgcagcttctgtgcctttgcagatgccgctccctctcctggaatgccttctccccacccttccctggctgaagtcctcctggccataaaaggctaccctaagtgcactgagcttccttgctaggcacatcttatcatcgttatttctgtaattcttcctttcattggctgacatccatgacatcagggcccaaccttaggtggctagcacratgcctgtggcagtagtggcagcagtagtcttcgtgttaccagcagcagcagtaatgactcttactgggcatgtgccatgtactaggtctttttcatactcatctctaatcctcccaacaactctacatcgtatatgatattgtstcctttttagagatgaggaaattgggacttaggtggggtggaaagatgtgatacctttcctcactcatcatgagggtcacagctgacacccctttaacaaaagacaggttgatgataaaagcataacaaatgtatttcatcaaagttttacatgacaagggagtcttcagaaatgtagacccaaaggcccagggaagatggtctgtttctatgctttggtctgaggaagaatgggcagctgtgtagaaatgtgattggacaaaaaagggtctgatctaatgatgacagactgagggggtagacagagcaaggcctgtctgttcagattcttcttggcctccctatagcattccttcctccaggtagggggtaggacccctctgaaatgaagggttttagggagaagggagagaatgacctttctaggttttatggattgctttgggagagaggggttctagattctatgacctgtcttgaggaagaggaattctggtttctgtgattccctttaggggagatgggagacaaggagggcaggagaaggtcagagaaagactttgcttctgaggcagctctgaggctacccaatatcctttagttcagagtactcagcctgccaaagcaccatagtttgggatactgttttctgcgccctggcacttacaagttaagcaactcacccagggtcatagagctaacaaatggttggaccaaagttagaagccaggtcttactcatttccaccctgtttcaaggactctgattagatgctcaataagtacctactgagtgaatgagcggccttgaaattgttttctgaggctggggaactcttgccaggaatttcaagagccactgcttttacacttggccacttaactttgctccctagagctttagtttctcttcttctacacccaatatcatcatgtctactgttttcttcctgagtcatatcctctcattatgttttagctatggcgggtaaggatggagaaaggggagagtctcctggtgcttgtttcatgtatcttattcccttgacctggtccttgttcccttgaagtcttttgtttgtctgtttgtttttgagacagggtctcactctgtcacccaggctggagtatggcggcacgatctcagctcactgcaacctccatgtcccaggttcgagagattcttctgcctcagcctcccgagtagctgggattacaggcacctgccaccacattcagctaatttttgtatttttagtagagatagggttttaccatgttagccaggctggtctcaaactcctgacctcaagcgatcctcccacctcagcctcccaaagtgctaggattacaggcatgaaccactgcacctggccccttgaagtctttatagtcgccccaaagaaattaggctaaacttaagaagtcactgcttctgtagatctaaggtggctgaatatcggccacagcatacagttcaaactaatgcagtgtatctattaaaggttataagaagatacctacaaacttccctcatgggattgttgtgagaattaaatacatataatacatataaaggacctctagtgcctaacacattgtgagctctcaaaaaaatataaatgttagctcttgtcattatttttgttaatccttgactggggtactaaaattcctaaaagagagtaagccaagaaaaatatgttaattattacagcaactaatatttattactatgcatcaagccatttttgtaaggatttttcatatattaattcattattaactaattttcatagcaatctgatgatgtaagtgttagccccattttacagataagaaggtgaggacagagaggcgaagttggggagcttgggatcaagtttctggttctagaacctacgttctttcataaccatcactgctctgaaaaagagtaagcaccagacctgaaagaaacataacagaggccgggcgcrgtggctcacacctgtaatcccaacactttgggaggccaaggtgggcggatcacgagatcaggagatcgagaccatcctggctaacagggtgaaaccccgtctctactaaaaatacaaaaaattagccgggcatggtggtgggcgcctgtagtcccagctactcaggaggctgaggcaagagaattgcttgaacccaggaggcagaggttgcagtgagctgagattgygccgctgcactccagcctgggtgacagagtgagattccgtctcaaaaaaaaaattaaaaaaaaaaagaaacgaacagaaatgttgttagctccttctcacttttatctctagtttgaatgagtgtgtttgtgaaaggcaaatgcctctggggttcttgcacagtcctgggcaccactgggaggagagagggcaacctagagacatttgtgttcctggtaaacaactgaaaataggcggagcctttgtgcactgaacccagctactttcaaatcgcagtacttcccaattgcaaacttggtgcaaaaaaacctacattgccacagttgagactttcatgaggaaagattttgggtacaagatagtttttcataccgctttgcttacccctgagactgcaaagtaccatgtctccttgttttatagaagccaaaacaaattctatcgataaacagaatttttgaaactctggtattttcagaaatttgtactgtgcataaagtaatggtttggtgaattaacataggtgattaaacaataaagtgatgcatacccatttccatagaaaatatatgcatatataaaaggaattttacagataaactgtatgatatatctgttaatatatcatgttttattttcagtgtttttgtgtattctcagtgtccgccagtatggagacaggctcatctccaggtgtgcaggctctgagtgaagggggcctcctcattggagtgtgcaggggcctcctcattggagtgtgcagggctctcctgcggcggcgcccactctgtgtccttcttccctgtttttgtttgccaccttgtggttaacatagctctgtggctcaaggaggagggttgggccggtatcatctctgaaggtaaaatgcatacatgcgatgctgtaacacagtctttctcccggcggggagtgggagtgtgtgtgcacacgcgtgtgtgggtgcagtgaaggtggagttgcccacttagtgagactcagagtctaccctcaaccactgtgcttctgtgtgctcccgtgtaggctggaagtcgtatcagccgctccattgcacagagattgcagagaaggggccacatcggtcagtgttagcgtccacaggaggaagttgtgtggtgggaaggccgcttctggctggactgcaggcttgtttgcccacacgcgccccagtgagagcgaggcctccacgggcttccttctccagtgcggggagtgtgtggcgaaggaagtatctgctgctgagctcagctttgcttcgccatgttccttcccgatccgctcatcctaaccctctctccttccgcctccatcctccctgctctccgattgccccagtgtgtgtgtccccttccccagccacccctctgatccctgactaccctcttctccctccctccctctgcgcccactcctcatcgcgggcctcaggggagccctgtctccactcaagacacccgtgaaacagagggagacactagcagtcagcgggcactttgtggggagggccaatttagaggacagattgaccagggcgagcagcaggatatctagaaagacgctttgcttctaaggagcgggagcctaatcccgttacaggctggagggagactcctggggccggcaagcctccttcccgctgtgcctggagggatatcattggaggaccgccgggcgcggtggagggctccactcgccagcagccccctcccccagccccttccactctcttttcttttgcagtgacacatactgcagtgcctctgaggtcatttgtttcccacagcctcacagggcgctgtggcaacaagggggacaatgatctctcacaggaatgatgggaggccttgttttgccttaaataagccccttcaagggagcagtaaggtctgttgtgtgtgtggtttgttttttcagaaaatcctcttgcacgtagttccagtgtgaagtactctggcaacttcaattgaagacataaagaatcttatgtgtgtgtgtgagggtttaattttatttttattgctgctttgagaccaggattgtgttttcccttctgccagttacccttttcccgctcaagctccctggacctccgcattctttcaatagttttagggcaggaattggcaggtgttaggggcagagagacgcccatgtctgggtgctggcttctgactgcccttagctttggtgagggagtgaaggttagcgtggcaggaatgtagtgctcctacacatttctcatcctatcctgggtctgaggaaagcacagggcactgggtggctagggctgggattcacaacaaagtgacagtggaggctgagggagacgtactttatgggccacctcggaatagatcatcagctttaacgccagagcttcagaggcatgtgcagaaagaaaaaggcctgtaagtagaataaagaggaggcaggttctgtgtctgattcggctgtccggtgaggaaagatgtgaagtgatctctacccacaccctggtaacaccactggaagacaaagaactgtcctgtttgtcttactgctctgtcctgtgttttaaagtcttcaagctgctgaaggcagtcccacctcagagcttacatgcgtaaacattattatctgtaaaggcttcctatttgatgaatcatggtgtatcatacaatctagatatttcatctggagaaactgagatgaggcagattaaagtcttttccaaaaccacatgaggaattaatttcaaagcttgagattaaaacctacatcttgtagtttcagattattaacttaccagtgtgatctacaagttctttctccatgttctaaaaaacaaattttttaaggcaatcaagacattttcattctctcatgtgagcagtatgtatcagaaaaattcatctgtataaactgtatggcagtctaaattatatttttaacctgtcttttctttttttactttttataaatcatatcttccactgtttacaaattttgttatgtctttcacatatcagactcaaaaacagttggctttatgattgggccactagaagaaatataatattttttcacttaccttttcatttcctgacttttttttagtgataatctgaatatatttgtgaaatatttaggcaggaaggtgagttttccagatgtttctgttgattattgcaaacacagagcaattcaaagactagtgtcgctttttgataaattaaaaatactttttttgataactagttattcttgactttaataaacattcctaagattaactcttcccttaacaactttagtgtaattttaatttttcacaaatcctgaagtgggagtactggaattttggagaaataaattaacatgttgccttatttctctggaccatctgttaatgcttattctcaactaaagtactgttcatcagcttcaagtaacaaacataccatagacaaatagcctatgtctgtgacggtgataagacattggccaaatcatcctctctctgaccatgacaaaagtgtaccagtcgtagctaaagcaagactgaatctatttggtattcattgtaaaggaaacaacaacaacaaaaataactaataaaggtctgagacaagatgatggatggcaaaagaaccccctatggtcataaataagctaactttggaaatgtttgacttaaggaagtacagactatgcttagtctgcctcgtgtccctggactaaagcagccttgaaggctcatctgaacatttccccaggggtttcttgcctattgacaaatcccaccacatcttccagatgcacagaagaaagttccgttaaatccaaaatggtaaccaaaaatgttgaatagcaagaaactggcaggggtggctttgggaactggtaaataaataacaggcttgttgtcccacaccctagtttaatgctctcaagaggttcttatgttgctcgcattagtgggcatgtaaatgaaacccctgttggccttggcagatattggcctcttccgtgaccttgtttgactgaaacaaaaagtcattggtggaacaaaaattcagagctctgaacttggttgaaagaaaagggcaattctctgaattgggtaattggatcaccctcccaagtgccctagggcttatatcaaacatataagaaggggattaataacttcagtgtataaatgagcttcaggcagcttccaactgtaacatttcactctcaggagctttaggacataacagatttttttcagagcattttgaagtgctctttataaaatgcaggaagggactacagactactgtggaatctttgtaattgtacatggtccagtctgacaggcaggcaacccgaaagcctcttcaaaatggccacttaataaaactgttcatgaaatataccattttgggactgaaagatgatgacagtgatatgttttcaaactgtacttgatattcccttccttagtcataattttatgatctagactaaattacatgtatcattgagtgtgaggattccaagacttgagacagacttacgtatttatgtgtgagttgtaagggaccattggaaaagctgagaattttaaaattcatttatattaattaatttgttcactcagtatttattcaatgcctactatatatcagacttgaggatataaaaaagtrtaaagtagagcaaggctgacagacatttgaaaggcaggttcatgaggattgaaggaacatgtgggaagggagccattacttcttaggagtggggaaaatccagaggagactagaggagataacgagagatgagtcgacagcacaggaaaataaagaagagtattccaggcggaggatacaacacttgaaatagttacccagaaaagctggcctggtgattaatcggcccagataaaagaggtaggctaacactgttattcgtcttttaaaggagaaggatcaagaagcagttctgttgggtcctgaggaagtgggattattagtgatggacacaaagtgctggtgtcacagctgtggtagaaaaagggaaacaagagaaagcttctgaaaaaaatgttttgacaactatttttatggctgtggacatcctgagacctctgacaatcacatagaaaagagagcccatagggaacattttagaattgattcttatcttaatagctatctttttggcctgtctggttgccaaaaagaattagcagaattctgctgtttatgtattgctgaatcagtttacaggtgatgttttattactagggaaatattgctaaagctaggtagaggtgcttctaagaactaaagcaccagaaacctaattgggaaaggaattaactttagtcatgtacatattttcatttttctcctttaatttttatattaacagaaaccctgtgaggcaggtgttttacctacattttcacaaatgagcacacagcctcgaacaagttaattcctcagaatcccacagccagtgcatgctaaggcccaagtccccttcatcctccattctcccaccggtcatagctaagtcttcaagctaatgttcacctgccagagtaaaggcagaatatttgaattctcttgtatttgttttagtttagttattgactatgtttttcttcctataaagtaaatatgtttcattctttctgcacaggttttcctataatgcctgggtgcttctagctagagagggcaaattgatttcatcttccattcaactccagaaggtctatagtggccgcttggactgctgtaatggagttgctcagcagccgctcccatatgctctatgatggggcagtggtggtacaagtgctgcatccctgctaccgaggctgctgctttagtatctttacttcactcttaaagtggggaatgagagaaattgtctaaagtcctaacacaagacagccatacctacttcccaaagtagtaaacactctgctgctgcatgtagaatgaaatagagcagtgaaattataaaggagatttgcagtctaataattgggagggaaaatgaagtataaggctaaatgaagtagactacaaacacctgaagcatgactacaaaatcaagttgacattttgtggctcattttcagggtagctgccggaatctggttatggtcgttgtttttattttttagggttttcccccatctgtgtacagtgagatagcaaccacaaaaaaactaacagccttcctgagtctcttggctgtagagtacccagctcttttccctgaagcttgccctgaagaggcctggtgatacatccctcttgggagatgtgacatggttccatattgacattacccactgggctcattgcttgagtctcaaggttgtttatgtatttgatgtttcatttaaaaataaaagttacttacggcaaaaatagcctagtgccagtgggtttggctattgtaaaatttagaaacccatttaggaaaccaccatcaggatcttgttggtgctgtatcagcttgggcatattgcccttcagcacaccggctcttgcacagattgcgtccactgagttgaattatggaaaccttccgtgagaaaatgagagcactcaggaagtagtattggtgatccacaaagcattgctgtgtcctctaaggttctttcctggtctcataccatggtttcttcctgggtaaaaagtgaaactggggttctgcctttctcaagggaaaacgtgtttgctgcttggctttggaattttggggcaactcagtcagtgacatttctctttcacaaactcctcctgttctttcaaataggtgccatatctttcactttccctatcgatacttcatatgttatgcctggctgctaggtttcattccagagcctcttgtgtttaagtaatgaatggactaatcataatgactagctcagtacaggttgctgagttggagaccatggcctagtcatttctctgatcacacagaagtcatttctggacaaaaagtgctacatactatatatctatatctgtctatatatttttttcttgatctttcttctattttgtgctgcaaaaacaaacttcgaggggatgattctctcacaggatatggaaatggccttggacaatgtccagggttagtggcacagctgctgtttcctgcaagggacatctcaaatccagaagggaaaaaagacaaagttaaatatatagcaggaggataatgactgaacctattaacccatttatgcctagtgttccattagtggaacactaagcttgtgggagttatttatatcctcatgcttaagctcatcaccaaggtctgatttttcacataaaaattttgcaacctctggcataaatgggttaacaagaaggaagggatttgcctgttacaagatctgtctgtaatcacatatagccattggcagaaattacagtttacatttagaagacatgtttaaaactctttaccaaagggcaactgatccaataataatgatagcaacaacaataacatctatttatggcacctaataattttaaagttcctttgtgtacgtagttttatattcacaacaacctagtaaggcctgtaagttgactggagagggctagggtatgtaaaactaggtaaagaacttggattttatcctaagcataatgcaaagttttcagccagggatggacatgacttgactgacagtttaggaagattacttggcctgctctgtaggagtatagactgtaagggggccacatgaaagccaggagacaagtcagcaaacataacactaatccaggagagagattatggtggctcagactggggggtgtggtataggggatggcaagtggtcagattcaagataaatatgaagacattccktacaaaatctgcaaacagattgaatrtgaagtgtattttaaaaaatgaagaattggccgggcgcagtggctcatgcctgtaatcccagcactttgggaggctgaggcgagcagatcacgaggtcaggagttcgacccaatatggtgaaaccccatctctactaaaaatacaaaaaaaaattagccggacgtggtggcacacacctgtagtcccagctgctcaggaagtggaggctggagaatcacttgaacctgggaggtggaggctgcagtgagccaagactgtgctgctgcactccagcctgggcaacagagcaagactctgtctcaaaaaaaaaaaaaaaaaaaaaaaaaagaaaagaaaattaaaaaaaragaattatctgtgtattttttatcttaaacaactgagaatggtgtcattttttccattcctagagttatttaggccaaaaamatctagaatgttgaagagaacagattggggtgggaggtgcaggttaggggattaagagttctgtcctagagggccgggtgtggtggcttacgcctgtaatcccagcactttgggaggctgaggtaggcagatcacaaggtcaagagatggagaccatcctggccaacgtggtgaaaccccgtctctactaaaaataccaaaaattagctgggcgtggtggtgcatgcctgtagtcctagctacttgggaggctgaggcagaagaattgcttgaacgcgggaggcggaggttgcagtgagctgagatcacgccactgcatttcagcctggcgacacaatgagactccatctgaagaaaaaaaaaaggggttctgtcctagaatagttgcatttgagatatgtaagtgaccgggcgtggtggcttccagcactttgggaggctgaggcagcaggattgcttaagcctaggaattcaagaccagttacctgggcaacaaacacagtgagaccctgtctctacaaaaaaaataaacaaaattaaccaggcctggtggtgtgcacctgtagtcccagctacttggggggctgaggtgggagaatggcttgggcctggaaggccaaggctacagtgagccctgattgtgccactgcactccaacctaggccatagtgtgagaccctgtctcaaaaaataaataaataagaagagaaagatatgcaagtggacaatgacaaagcagctgaataaatgagtctgagtctagagctcaggagaatgggctgagctgtagtgagaatatggcagagattgatcctggggatacatcaacatttagaatagaagagaaacctgcaaaggagactggcagggaggagaggatcaggtgggaagaaatccatgagagtgtgctttttctggaagccaagtgaagctaatatttcaagaagcaaggagttaggtccagtgctgctaagaggtccaataagatgaggactgagaattgacccttggatttggcagatacaatcaatggtgaccttgacaagagtgatttcagtagagtgtaggggacataagcctgcctggggtaggttaaagagaaaaacaaagagcatgttcaattctttaaggtttttcactacaaatggaaacagtgaaatggagtggtagctggggaagtcaaaggaggttttttttttaaggtgggtgttttttatttcgcattttgatattgatgtacataatgcagcaaaaagagaacatgtagtaatgctggagaggaaaggataggtaaccattggtaaaagacctcaaaggtattagaagggattgagatgctcgtccaagtgtatgggctggccttaggctgaagcaagactgcttcaagagatacaaaagcaaattcattaccctaagaatggagtacatcacagcaggattcctggagagaaacagaaaagagggtcattaaaaacttatgtcaccactttaaagagggaagaaagttctgtttggctcttttggggactccagaagaaaagtaaaggtatactcataagcccaactttttaactttctagttaccagaacaccaaacaaggatcttagaatatcagattttcaattaaccctagaaaactaacagcatttgagtagaattcaaatatatgtgagagaacataatacataaataccatctgggaagttctctaatcaacattctccttccctagcactcactgttggatctgtagtacatgcatatgtgagtgaagagctctttcacaaatatgaaagaagcatagtatggatgtagggtgatgatttacttagtgtggtaagtgtctccaagcaacacagtaagggacagaaaaagctgggccagcctgcctctgggagagacatgccaagcttttctatctctgtgaatctcacaagtaaatgaaaataagtgcaagtagtactatagtaattaaatcaaactatcttctttgagagtggctttgtatgtgtgtccccattatttgctaatttgctatttcccactgcttactgattaccctgagtatgttgcatttattgtcctatttaatcctctaaactctatcattgccattttacagatgaaaacatagaggccagagaggtttaaatggcttgttcaaggccacatatctaggaagtgggagagtcaagattctaagtttaatgcccatcaatgatagactggataaagaaaatgtggcacatatacactatggagtactatgcagccctaaaaaagtgagtttatgtccttttcagggacatggatgaagctggaaaccatcattctcagcaaactaacgcaggaacagaaaaccaaacactgcatgttctcagtcataagtgggatttaatgatgagaacacatggacacagggaggggaacttcacacaccggggcctgttggtgggtggggggcaagggcaaggggagcattaggasaaatacctaattcatgcagggcttaaaacctagatgatgggttgatgggtgcagcaaaccaccatggcacaagtatacctatgtaagaaacctgcacattctacacgtgtatcccataacttaaagtataataaataagaatttttaaaaaagattttaagttcagtctttgtttccaaagccagagatctttccactataccacactgcctcttatgtagtcagtgataataatagcttggtcatttgcatttgtgaagcaccttttatttgaagagctgaaactctgtaagccttatctttgtaatctggagagaggaagaaaagaaccgacatttattgggcaccttatatttgtgtgtgatgtaattttaagcactttcataccagacatgttaattatcttcattttaaagatgaggaaatgaaactcaacaaagaaattaagtaaattgcccaatatcacacaactcccatatagtcaatcctggcactttccctcagcagattctaagcaccgttggagcagagagcaagtctgtttttaatcattctgattttcctagtgcctaggacagggtctcactctggcacataataggtgctcagaaaaaaaatgattgaatgaataatgagcaaatgtgctgtaagctgaactggaatgcattgagtcttgtgttgtacttcctggtatcttccagtggatgtcaacatgatataatgagaagattctgagaaggaatcagtgaaggcatgcatgttcctgactgtgaaacttttgctcttctcagagctatacaacctaggtgatagacttccttttctttcattgggaaaactgaggcaaagtttccttggcaaagattttgcaagtcagtggacaatttgtggcacaactgaaatcttgagattctcacctttatagccctaaccacttaacaaccctgtggtcctggtggggttatagctttccataaatctggtacttaatcatttaaagagatggcaatttatcttaaatacacgcctcattatagatgtgtcacacttagcacagatggtctcagaagtttttcctggcttcccataccctaacagtatctagtatgttaatgtcaatattagctttactghtttaggtaactttggtatgcttctcattagctgaaaccgtaaagagctcagttttacctgcgctgagggatcactaaattcctattggcatctgaatgcacagtcccatgtcgaaagtgaggtcatgtttctcctggattatgcccgtatctgatgagcctcggctggcgtgaatccgagacaatgaaataatcacacccattagctcaccagggccctattaagatgtggcctggctttccatccatttctcctgcttggaaaaactgacacagtcatggtttgtaaaggttagtgcagatggaactgcttcaacaaccaaaacttarcgttaccctatttaaacttgggaagggtctgctgcttaatcttaaraaatagcacttcasgagccagggtgtgaggatgtcctttaatctctttgtatgtgatggtaaagctgaattttcctaacaccctccttccccgctctcagcttcagtggctggggtgggtgaggtgggggagctctggagttgtggtttccatactttctactttttattctatttttctttagagatcccaggttttgaaggcttgagtctagtaaacaaactgtaatggttaaatcacgattttattttctcgttgacacctagtgtgtgttatatgcrgcgtcctctgcctcatgtcattctccaatatgctttctcagggctactttcccagaccctatgccttcttatgggttgtagctaacagttacacttccagagtatgccgtccctcacccacagagctcttctcacaactgtaactaactgattatttgtgtaactgtttgcatgtttaggctgtaaggatgcagaccatgtctgtcttgctcacagctgtttctctagtgcctaagtctttgcttgatacatagtgggcacttggtaaacatttgttgaatgcattaatgaatcagcttatttaattctagtgaaaaatataaagaaatatcccccttatattggcttggggagccttattctggatatatttgataggatttttgaaatgttgtcaacaacttgaatgaaaatcaccaagtttaaaatgaaggttcactctgggcaggagagaagatgatgctattggagaaggattacacaagaggcttctggaatattgataatattctatttattaagctggaggactcctagggacccaggggcctcagacttactcctgaactggagggacatgccaaataagccacctgctatttatttcacgcacacccaaggcaaagctgttggggccacttaaggattttgtaaaatgtgagggtgttattaaagtaggcttattattttacagctcttatgattgttcacctaactaccttgaacaatactgcaagtatttttctctgctcacatatttggagacatgcagagccacttcaaacaaaccatcctgacttcccatttgtatctacgacctcatgaacccatctcaaccccccaaaccacacactgaaactaagccaaattaaaaacaaaaaacaacccaccacccagcagtatttagttgagcacctactgtttgctttgtattataagctgtaattacaacagcttgagtcttgtcctcagcttcctgaaatctcccagtggatggcatcatggaagaatgagaaagttatccaagaatgaatggtctgatgtcaaggaagcttttcagcctttcctaatggtctgatgccctctgtgtgggttacaatctttggaagtataagatttcttgtaaaagtcacagcacctgccaacrtagttgggcagggacccaagtggggtgacttgtaccgcattcctccctggtattcagagaccacatagtaccagaagcttgctaggcccagctcctggggactgtcagaggaacaggcccaggcagtcttctcctcagattgcaatcaaaagttgcttgataaatcagtaagattgaaaatattcttggcagtttacataggcaatggtaagaacatgtttttttgtagttacaatgagtacattatacaagggccggaagtgaccaaaatcattgattggctaattagacataactsaagggtcataatgcttcagtcgttatgtgggaatattcataaagcacttgagttcagctccaataaagaggagaaatgtacccagggaaattgcagagtaaaagtctgggaatgtagatagtataggatgttacaggtctgaaatggaagggtttactatattattgagttttgcaaacagattcttggaaaacagattcctcaagtctttcccagctttcagatgggatatgaaactagaggctttagcctttacttgtggttgtctaaaaatccaccctatttttcttaggaagggaagcagttgccttaacaccctggccagattcccaacatgtacagggtggcccatttaaaacaggcctgtggatgcttcagagtgagcgaaggggtttgttgtaaagcaccatgtgtatgtgggtgtttaatgaatatgagctgattaaattggccaccctgaattataacctcataccttctctagttcctctccagtttttagctcaggaccatattcttcctactttctgctcaaacttgttagggagaaacgttcccactattaaaactgccagtgttttcctcccagtgtttctttgtttcaacgatgagcagaagaatccagccttggaaatacctttctttcaaattgcttgtccagctgcaatgacgtctgcatcagccacacccacatcacttccccttcgaaccttctcgcctccatctgcttccctgtctctggtgtaggacaataccagtatctgtctggagcagatagtgaactctgccacaaacagaggagggcttgtgtgaagaaggaaaaagctctgctttcgaaatcaagcagcctgggcttgtgccccgtttttgctaatagccatctgtgtggcttagggagtcactgtcttcacaggcccgagttccttcatctgtaaagggaaggagcgagacaaaatcagcacttctcaaattgggagctgtagattcttgaggtctgcaagtttaatgagattttaaactttttatgaagtttttttttaaatcataaagacaatactttgcaattaaaagtcatttaaaaaaataagtcttaagtttgttaagctggtcattctgaaacttaatcttaggtctcctagagattttttaacagttttgcaagtctcaatttttcccctttaaaaggactscacatatcactccagtttgagaaacactgaactcttttcatctactcagaaactgaatctagcggtaggataaaacattagctttaactttcttatccttaccctactcaacctaattacttttggcccacttcaatatgtttaagtcttttagcacatgggctccttttgttttcataactgaagtatttcctgttttcaatcactatatgttaaattataaaaagcatgtttctcccaatagctctttccctttccctttaagactcagatcatttaatttattagtgcccaacctggttaattgagaccaccttcctctattaatgtttctttgttggttgaagtgaagagatatatggtctgttccctaagtacccatgaaggattggttcaaggactcagccccatactaaaatcttcagatgcccaagtcccttatataaaatcacataatgtttgcatataacctatgcacatcctcccatatactttaatctctagattacttataatacctcatacaatgtaaatgctatttaaatagttatcatgctgtattttaaatttgtattatttttattgttatattgttatttttcattgctttttttttttcaaatattttcaatccacattggttgaatctacagatggggaaaccctagatatggagggctgactatactgcttttatctgtgatctcaagattgaatactcacagtagtttatgtatgcattctgctttcataatttgcagaatgctctcatatacattatctcttgattttcactgcagtcttgtctaataaatgatgtaggtagcatgatccccattttacagatgagacactcaggcccagaaattttgcttcatatcttctgattcagtctacttgttctcccaacaatgcttcttcatccaattacagcaacaaatacatactaggtacctgttatttgccatatgtgctgctttattgttacttgttccgggaaataacaagtggagcttctcattcaaggataaactgatattgccaggccttgctcagtctgacataagtctcatgccattatttactaaaatagctagctactctcacccagtccggttcctggtacataaaggaactcaataaatatttattggatgattgagtgaatgaataaatctaaaataaattatatcattaattaaaatttatatattggagataatttttgctaatagatttttgccaacattttttcagattccaagtcaataggatttactcagagactgccaagtgctttaaggggaaaacagagggactgctgggagaagggggtgcactggtagacaagtagaggaaatcccctttctggcttcatccatcttcctgtctatgatcggtgtcctaggccttagagtggacatggagaatggtatcactttgtctgcctgcagttaaccaaaatacttactcccaccatagggagaagagaggaatgacagaggtatgtgaagattaagtagaaagaccgacaaatgtaatcacattggaaggtagaatggagggtagaaaagttggtgggaagacaatttctgtggtcaggatacatctgaatggaaaggggagagagattttgtccattcctcccatagtatggtttggctactttccctctacttcccaagagaattattagtgaccagggacatcacattttaatcaaggcaactgttgctgggctggtaagcaaggctcccatgggtgtggtgaagttagcagggtgaagagtgaggctgctagtcacaaagggatccactcaccctcttccgctgttggcggctgctgtggtatctataaacatagagtgtgtactcacatactcataaatgctagttattgtcatacgattgcattgtgtataaaagtagattgcctggaaaaaatgattccacttcatttttatatacacattgttcctggaaccacttcctgaaatcccaggcttttattttgctgtcattctcttraattgcctctttctcaaagcatccgggttctggagatgttctcgtgcttaaagtgtgtttctaagtagcttctgggaaccacgtaaaattgtctggctccacttgaccaatgaggagcttacttttcctcccaattattcctctctgacagaggccgttggtcatcttgaaaagctaagaatgttagatgggaccaaagtaaaattgcaaagcctattcacccagccaaactgaaacacacctgattaactgaccacacacatggtctcagaatgacatctcacttggggagtaaaagccaacagttgtggttagtgccccagcaggccccagatggttagagttaatatacacctatgttttctgccaggtagttttcatcagtttcctcaggatgtcagtgtgtgtgtataattaagagtatttaatcatattataattccccacagagagatggagtgggggatgaaggatcgctggcttttacagtctcagcaagagtcatcagtggaaaaaaataaaaacagaaaaatgccaagtctctgggctgtgcctgtgccataactcactcagaagtctggctggcaccactacctcagtgtcatttcagtgaagatgtaatcccaaatcttttgttgcaatcttagggttctcactattttaacattagcttagaacatgtggattgcaaaggaaaactgtgttctaattccctgttcatcaaggctgtgatttgtgtacacccacataaggcaaccttcagtttataagactgatgacttcagtcttgtaaaaataaatgagatgggcacttcaaatattttaagttagatcaatcagtagggtgagcacagtttaattggcatctattgatacatttctaaattaaaagagcagaatatagagccatgaatcttagccatgaaatcatgttcacatttattacaaatccataattctttcctatttccccatatatcctgttttctttgtcytgtcaattgtcaaatttagctgctggaaatgatctcttattttggattaggaaaccaagtcctaatgaccgtaagtgacttttcagagtcacacagctagttagctagttagaatctgactcaccagaattccagtctttctactttgccagatagtctttactgggaaatacttttttacctatttcttasaagaatttacttatgtgagcttcacttaaagcaatattggtctatttcctagttcccttaaactgatcatggtgcatttctgttaaaaaagccatagagttggccgggcacggtggctcacacctgtaatcccagcactttgggaggccgaggcaggcagatcacaaggtcaggagatcgagaccatcctggccaacatggtgaaaccccgtctctactaaaaatacaaaaaaattaaccaggcatggtggcrggcgcctttagtcccagctactcgggaggctgaggcaggagaatggcgtgaacccaggaggcagagcttgcagtgagccgagtttgcrccactgcactccagcctgctcaggcgacagagcaagactccgtctcaaaataaataaataaataaaaagccatagagtttctttataattaggttctaacactacttcttcctattagtcaataacagtgccacaataagtggattgggttaaaatgaaaatcaccaattgagtctctacccaaaaccccttccagttgctcttatttaggaggaaacagcttctgctcagtttctgtccactcacaagacctctcctgcatggaaccctgtccacagtttctatcactccayctgtgcttacttcagattatctctgaaacaatcagatgtaatggccagtggatgcaaaatacatataaagtaagatttgggattaggaggctcaagggggatggatatgtagagaaaagacctaggaagaacaagaacagggactggcagaaaacacattctgagacaaaggccatttatttagctctggccagttggtttatctagcctgacatttctcaacctgggcgctattggcrttttgtgccaaattattcttgattgtagagagctatcctgtgcattatggtatgtttagtagcatttctgcctcttcccactgggtagatgccaatggcatcccttcatttgtgacaaccaaaaatgtctccagacattagcaaataccctggggagtgggaaagggagagagaggaagaattgtctccggatgagaatcactgatctcactcaaggttttatctttgacatcagcgccataagatattttgtgagaggacagagtggcctttctaattcttaaaagttagggttctactccagacattccttatctactgcaaatacaaattatttatttgttcattcattcaaataacagttattacagatgacactatgtcaggctctctgctaagtctaggtgaaaagacagaacctccccacaaagacttagaacttaatactcttaaaaatcctagtcattggagttgatttgctcaccaatgctaacaaagttaagactttgaggttgtattcccttatctggctttaactcagaccaaccatttcactgattggaccagcacaatgtatcctggctactctaaaagtcacttaaaaaaacatatcctactggtggtatgttgatagtttcctgggatatgaaggtgggcatggttaaagctgaaaggactcttagcgacaagtgaaaaaaacctctttggtaaatcactagcatagtattacatggcttttttttggcctgggtgcagccccctttagactcaaaccactgttcttcctgataacacatggccttatttatgttcattgtatttatttagcttattttgattcctctttctacataagaaaccacaactggaaaaatcaattaatttttaatttgctcataaatttctacccattagaaggaaccaaggactcttgtaatttggcacaaatttcctttcagtatttttaatctctttggatatgtgtgagttgaattctctttaaacaacatgaaaatatataagctatttatataacttttaaaagtatcaaagagaagactctaacatccctcactgaagcttttccagaatttaccatgtgtaccagtgtaccagttgttctcaacccagggtactttgcccccagaggacttttgacaatgtcacagatgtggagggatgctactggtgtctacccagggacaatgctaagcatccyacaataaacaggatggtccctccaaccaagacttatccagcccaaagtgacagggtgctgaggttgagaagccatgtggtatataacacagatgtacacactggaggaaacgtcactgaagtagatgctggtcacttaccagtttcactccttcaggatatcctcttctttaaacgaggaggttgtgactagttacttcccatgaaaagcagctgacccttagggttgaaaagtatgtttattcccaatagcagtgaatgaaaaaaaaaaaacacaatgaatttctacttgcaagaatgccatctgtggttttctccaagtgttgctctcagccctcagtgttcagggtcttcttcacctgtgcattctgctgccctgcgttatcagagttagaatcagggtggaatacaaatatttccccaggcat[450 bp omitted]tattttcttccggaaaatcttgttgtttacgtggttggaactttattattacacagattattataaaaatgaaccaacactcaaaagtacaaggcaggatttcccacaatggctatgtcctggctggccttgttgctagctggcacagtaatatgccacctggaagcaatgaccattggaaaagaagccaggaaaaaaccttatgagaggcacagggcagtagataatttgtgaagcggtcgtttgcctcccagagtggcaaggctggcatgtctggcctaagtgtacactcacgtcatttatcacatcctctggtagcagcgcctctctccactgcctgtgaaggaaactgttgcacaatcctgaagatctgactgaaggaaagttgtcttgggatcagaattaaggttcctttttcttgttttcgtttccgagttgcaagttatgcccctttttagcgttyccatacccagctgtctacattttaagcaatcgttatatggaattatatcttaaatgtaaaataacaagaattcatttaaaataactgctttccctccagaaccagaggtatctcaccaaagctgtcacctccccaccagtatactccaattgtgggtgacagttgtgtttagaaagtggtgttatagctccttttatgtaggatgattactctgtggccatgaccttctgggatgaacggaaagggctggacagagttacacagcacgacgacagaggagaagcttgtggaagtgcattgcaaacagagatgggcgagttaagttactcaattgccatctgcctctgttttgctaactcattagttcggacaccacattgtgttaatccccacttccctggctctgagcttggtccaggtctcgggggaacagtgagactgctcagctcgaccctcctgtcagctgggcctcagcttctctgcatcgacagcatgccaggcctgccaccctcgctgccacatcacatcaaggtgaagttttctccccagcccctggcaacagaaattgaagcctttggacttcgctcattcttccaaaagacttttctaggcagtgggatagattttcgccttacaccccctagcactctcttcccttccrgcactccttcaaggcaactgcaatttcaggctgaccatcttggaagtttgatggcactgagtaccaccagccaaatgctctcacattttctgtgcctctcagaagaagagcccatatggcagctaagaaccaatgagtgaggcctaatttgtcccccaagactatacgagaagggcagtcttacttctggacctaatctagcattacgagcatccagtgatgacccttacggtactttctgagagtagttgctcataatcatcattgtctctgctggtgagctgactgggatacgcaaattgttcctatcaatttattttgacctctctggacttcagtattctatgtgtgaaagggtattttctgagaatgattagataatttgtgatgtctttttcagctttaagtatgaaaatgatatgctaattttatatgttgtcagacactactctaggcatttaacatatgcaatcccatttattggtacccaggaagtagacactattacatctctgatttgcagatgaaaaactcaggcactgagagattgtttgttcaaaggcaaaggtaataagtgacagcccagagattggctcccgagtctgtgctcttagccacttgtggtcacttaagatagtcccttaatcacttcattgctctatttcccgtcttctttccaaagtctgtgggttctcaaatgtgatctcatcaacatttagggcagtatcctttggaggttattgttgcccccttttttacaaatgggcactttragataaaagcaggccacatacaagctattggcagaacccaggagtccagcttttgtgctgtgggttccatctgctatgtgtctctcccagtcataattaggatgatcaaaaaattcagatataacctgcttacccctctcaaccagggcaaatcagaaacagctccatagacaattgggttaagtttccaactcaaatgttgaatgatctatgcagaatataaaggcgtttacaagccaatgactgatacagatgcagcaataacatacctttccccagtcctctctttgctgtaaggcacccactgaatatcttacacctctctggatagcaggagttacagcaaattctgcatatgccctcccacatttagcacatgcagggctcatccaagaattttagcagcaggggatgatagagtttgttctctggttctttctgactgtctctgccctgatagtgcctagtacctgagtggcccttcctctgtcctctaatcccactggattgcacgtgccttttagcactggaggttctgaaagccaagcaagaactcctcctaatggcattcagtacctctttcttcccagtcccaggaggggtttcccagcaagcagagggaaggtgattgtttctacctctcatttagtccttcctttccaacttgatggtataccacctgcaaagctatcccagaaacagatgaaatttaggatgcccgaagactggtttgtgacatagaaaaattggaattgaaatgaaactgcacattcattgatatcacctctcctttgtgagtctggacctaatagagtggaatgaacaacaatactgaaataccaaacttatttatgcatttaagtcaccaagtgatttgggtttttgtatcagggatggttgttgcttttccctctgcaatgttaaactactgacccgtttcctctcaaattccagttccacgtttaactgaagacacacagaaataaatgtgtgttggcagaaagacaaaccctgagatgaagcaggaggtatgttggctgatagaaaggctgttattttaatttcttttacattgcagcagtctcagatggatagtatccaggtaacttgtagcgcctgcatcttattaaactcctgtttgattcagaatttacagctaaaatgcacctggaatacttaaagtaggaactagactttggttcatttgttctcaaaagggatgtacaaatcgattgcacaacctacagcaagtggcataaaaaccttcagaataagatgatggcacgtttttgttaataactatatttcttgatttataaattcaacaatgctaatttagtgtttactgtttgacagacattgtgcctctatagcaggatgaactcacaggcatgttttctgtacgtctgtctctttttattgcatgtgacagaaaccatactcaaagtagctgaagcagaaagtaaagttatcacaaggatactggcatatctatagaaactaaggactgggatgcagctgactcaaagaagagatggaaccagtgttaaataacattaagttagttggtctcacactcttacacacacactatctcttacacacacactctaccactacaaccactaaatagctgcactgtcgctacatagccaccacccacatgtagctactgagcacatgaaaggtgccttaagtgtaaaatatgcactgaatttcaaggacagtatgagggaaaaaaacataaaatgtcttaattttcatattgattacacgttgaaatgataatgttttggatatattgtgctaactaaatatatttgacatttattttaccaatttctatttttttcatgtgcctactggaaaattttaacttacatatgtgacttgcattgtgtgtgtgtgtgtgtgtgtgtatatatatatatatatatatatatttttttttttttaattgaggcagcctctctctgtcacccaggctggagtgcagtggcacagtctcagctcactgcaacctctgcctccctggttcaagcgattctcccacctcagcctcccgagtaggtgagcttgcaggcgtgcatcatcatgcccagctaatttttgtatttttactacagacggggtttcttttgctgtgttggcccggttgatctcgaactcctgacctcaagtgatctacccgccttggcctcccaaagtgctgggattacaggcatgagccaccacactcagcctggacagtgttgttcttctagttggttttcctaaacatctacagcaacataaatcttcccatgccttagttagcctgatttagttgagaaacactgaagggacaatcagagacatatatcaccaatcaagtatatatcattctatttcatccttttctctctcctttactgtccctcataatttctacatgagccgaacacacacacttctttttgaaagtgaatgtatatattcactcacttcaaaaatacttaytgaaccccaattctatgctaggtcttacatcaggcggtgaggatacaaagtccctgccctcacagagcttcctttctagcagcctcagccacttttagcttgttttcatgaatggagccctgatgtgggaagtgcacctcccagcgtggctgcatctggtccaggctgaatgattaacccttatagtgagtctaagttgaatgaaaacttggattttcagagtcgccattaataccatgttgtcaagggagatggcaaacgatgttgttattcacaagtcgggagccttcaatgatgtaaatttgtatttctcttcccatttttatggagccatatttcagaattcagaaatggaactatggaaatatggctctccccgtccccaaaaagagtccttcttctagacttcttgacaatatgtgtgaggaagcctctggattcagttgttttgtttttttaagtaactttttaaatgaagtataatatgtaaacaaaaaagtgtgtacatcgtagtgtatagctccatgaactttctcactgagcacacatgtaaccagcacccagattaagaaacataacattaatagcgcccatggaagctcctccttcctgtcatgaccccatcccacccctccaccctcatcccaaaggtaactaactactatctggacttctacaaccatggattagttttgcctgtttttgaactttatataaatggagtcatatagcaggttctctttggtactattttcttttactcaatgttatgtttatgaagtttattcatgctgttttattaacccatagaaaatatagatagctcccaagaagaaacataaaaattataatcctactacattaatatgtcagtgtttgtccttctagccacttttctatgtatatacttatgttaactttttttccaaaattagaccatagtgtgcatactactttgtgatttgctttgttgtttgatatatcagatctaccaatgtgttctaaatgttggtcgttgtaatgaggctatattctgaattgactaataggtaatacagaaaagtagaaaattattttttaagtacccataagtatttatattaatcattttgtccgatgtagatttgatccgtctcagtcaggcttccaaaagacttccaaataaaggtagcgaacaaatggatcactgattgctagggaaatctggtaatcaagaccaagttgggcctcttgtttctcaatgaatcttctaaatcactctctactgttttaaacctaggtattctgcgaatatgtaacagattaggaactgaataattctgagaatggcttgttagagtctctgttcaactcttggcttactctataatctgagacaagtctgtaaaatgttccttatttctcagacgaagagcctcatctccacatctgtttgggatcataagaaataatacttacataacattttggaatccttgaatgaaaagttttttggagttgctgactgttcctaaaatttcctcaactaacattgtggaaatccattgttgtggatatagttgctgagctaggtcataactagattgcaaatcttgagtagtggaaaaatctacgcctcgaagttctggtcatttattttaaaagctattcatttattcctagatgttcatactgtgagcttagcctgttatcattttggtttacttgctaaatattcacatttggggtcttcatccttacccatttaggattgtatctattggcatatgccattggatttgtctgagtgaggtcacctggaacactagtgttctgacattgagtttacactgcagggatgagagaagtaaatattcctattagtcagtaaggtttgaatttataggctgagactcctcagacactgactgtctgggacccttggagacagaccagcattgaatgaaactgaaaggtagagaatatactgtggctgggaaaagtgatggagcaaatctatgcagagatacaatagtaggatatttaagagttggaagggatattagaggccctgtggtcatacttcatttttcagttggggaaactgaggcttaaggaggtcacagaatgagttagtcacagagctgggttagaagcttactttagtgtttcaccaactactcagatgtctgcactactgagatacatagagaaagagcgtcagaggaaggattagggtgtcctctagacctcattacactaatgcagtccctggtaggatctaaagacgtacttgtctccaagacacctgacaagctgagagtattgattcattctttcccaacttgggattgcaatggtgaaaggaatttggcattttatctaatcagcattggaaacttggctttcttttggagaattcaaaagttcagtttaggatatgttcacaagatactttcctccagaattaggtgggagataaattattaaatttatgagacttgtctttctttctttctttctttctttctttctttctttctttctttcttctttcctttcttctttcttttcatgtagcatttctttttcacattgtttctgatgacccttaacccctgctttttaaattcagtttcatttgtgttgtcacatatatatcagttgttgagtctttagtatgcggagatgctgagcttgcccttccaagatgttggaaggtcaactcactttatggtctaggtccaggaaacaagaatatttccaactcgctggggaccatcttggccttgagcagaaatgggatctgaattattacctaagagacctttgtagattgtcacagttggcagcctcaggacttgagctaatcctggaaattctttaacttcccagaaagaaggttccacaagggcaggctgaggtcctcagagagagcagatggaatagagcttacaaccagttgcctttacaactggacttggagataaataataacattatacccattttttttttatcatgaagcctttgactttcaggggatatctattctttattccttttaccctgtatgtggaaaaaaaatgctctgtatgaaagaaaagcaagcaaacttgttgactcagttcccatggtgaatgcaaggcagaccaggccaatagaaacaactcagatattacaaaaatgtgtttctttctggcagctgcacagtcagtcctttatatccagtcactgcaatcgccccatcacacaaaaccatttccaaggtcattattctggttgcgggggctgcttcccctacaaataaatgttggttttactaaatgtcctctctctccaactcactttatggcaaatgaggagtagcaaagcatcatttaggaagagaaagtgtagaaaatcagagagatgaaatactacaggttttcyaaaggctcaggtttatctggctcaagcaatacaaattacaaactatggcaccacctgtataatctggttttaattaacttgaggaaggtacatcaatgttatttcattaaaatcaaattctgtttaaatggaaaaccaccactacagggtacattggggcattgttcacttgggttttggggttggcaagtaaatcctgtatttagaaaaacccaagcaaaccctgtttttttggaatcttcttatgcttcggaaggcttgtcataggttccttggaatgtagggggtgccctggtgaggaccaaggcacagctcaagatgttgtttgccaattcttccttttatgacccttctagtcttctgtcttcctgctccctgcctgtctccatatctctttagtgcttggccttgatgccctataggactctctctcccatttgccactttgaactgaatgatttgatccccactgggtggacagtggatgacatagggcactctataaacaaagatgctatttcaggcttacaagaggaatgaggcccacgtgatcacaaggggctggtgaataatagaaccctcttttgaaactctcacttcaccaattacctaagagctgggaggaacctgaaagatcctataatctacacacctccttttccgaggaggacactgagattcggaggtaaagaaactggtccatactagtgaaggctgtttgagtggggcctccccatttcgactcatgccctttcccctccagcctggtgccccagttctgcagacctgttgattacaacacagcccacgccgagaaaatcctgccctgtcagcagaacagctttacaagctgacataggacatgtgtgtgtttggagtcaggagaatggctgagttttagttccagttctgcctctgctttgctggcttcagcgagtcacttctccttcctttgtctatttcccctattgggaaggagaagataatkaacctttccacctatcaggctcacttgagtgttataaagaataatgaggtgatatttgtaaagtgctttgagctgctgggaaagaggagggggtgagctccgtggaaaacattattagctggaagsacttatcaattgagctatttaacaatagcagagagtaaggatactcagaaatgaattccagggactagccctgctttgaatttaggaggaggattagtgggaacctaataggtattccgcttctccagtttcttcagtgcaccgtcaaactaggaaaggtaattacattcttctatgtcggattcagcccggagtttcaattgggatgtcaaagtgtgcttgtcctctattctcatactgaggctgtgttatggtgtgattgttaaagccttgggcatcttctatcccctggggtaatttcgcttaggagctatacaaagtaatttctatgcagtggctgggctgctgtttataaggttgattagtagagcttctaaatctaaagcgcctggggagcaatttggttgaagcagggaaataaaaggcaaggtctttatcatggttgatctttttttattgagccgctccatgggaattttctcagtgactcagatgcatctacagtgcaaaacgtggggcttggtggctctttgacatggcaatggaggcctagccccaggtaaaggtgaacttgccaggtcactaaatatatttagggcccccttttaacttcctttactctcacagagggtgatgtttttggggccctgaaatgtgtgggaatgtttccaaaagattgttctgatgagggatctgtttctgcaaactcctgccccactgtttgaaagaccgtctgccccaaattcaggtctttctcatttttagggccagggaagaagacagaggaagagaagaactgggggaattttgttttgaacttgtgcagtctctgtgggctgactgaacagtgagccaggcagaaggtggctccctctttagtcggcaggagcagggctgaattttatcaacatcttctgcaggtgtagggagaggtcaagatgtcatttggaatgataatttctctgatcaaagttaagttaaggaaattacagtgattgcatctttgtcccctaaagtttatgagcctctttgtaatcgctgcttccgcaaacccttccccaccttcccaagttctcaggcctccatctgcaggggctgctgggcttttccctccaggaaggacgggctcgccagctggccagaggttcctgtattagtgctgccctgtactgacttgtgagtctccagtaacaatcctccggtgtggcacagctacaagcaatgaccagggaggcccaccttgaatcctgaacctctttgggggctgactcagtcctctgaaactgactcttggattccttcctgggtttgccaccaactcattttctcagcaaatcacttctctgccttgagactccatgaaataatataaggtttccttggcaggattctctgacctttttcagagacccagatttcttgtttattttaatttgaatgtctcaatcctctgaaagcatttggaatattttcttcatttccctctcccaaggtatctactttatcccagacagggctcccccagtgggttttgaggggaaggatgctgaggctttgggccctggctcctgtcctttacttcacctctgccagggcaaagaccagcactgggctgacctccctgggctgggccaaaagagaaggctgtggaagccgcacgtctccgatgctgcccactgtcctttccctctgcagccacagctgcctccagcccccctcacccccgcctgctctttttctcagtgagcctcagcgccagtgccccagtgagctgctgggaacagaggtccgtcccctgcactggcctcggctccccgcaccagaacattcaggcatcaatgggaaacagcaagatctgtcggcatccccccctttcttcaggctttgagggccacattctccacggccatctgttccctttcacctctctggacaatgttgctttttaaagccagcgattcttcctcctttatcccctcctctcccgcctccccttcttctgtgctcccaccctttctacctctcctctctttgcccgattcctatgaaattagcctctcttaagataagatttgcccttcctccatacaaagctgttttgcaaacactatgggtttttgaatttttatttttacattttgtttgaagtgagggcttgctacttttaaagtttgtgattgtcttgtggagggggtagtcttttgatagggataggaagggggaggatagaaaaactttttagtcatgaaaaaagaaaatacagaataataatgagttttaggttcctgctggcaggcacttgcctctttaaagaaggaatcctccctttcctttccttgatgatcagtttaaggaaatttttatgctctcgaggtcttcccaccttttattgtattactattttgttgttgctgcaatgttgttgttgtgctgtttttaatttagagccagggcttctgtggatctggtacagcggattcctttgtcttggacagagccatatacaactccagaggttcctggattcaggcagagtgcccatggtgccttctagatgaagcaatcatcctgactcaagggctggacatcaaggggtgtttgccccaggactgaccagtgactaagtgtgtgaccttgggtacatcactttctttaagaataatgatgacagaatcatttacttcaaaaaatttttaacacatgattcttctgtttttactattacttggtttcacaagcaagacgagtccgtggtaatgtcatgaaaacttatgggttatccttgggtaaggatgtaccaagaatccaccgttagggtctagttgagcagcagacatgggaaatatctaaaacaaggacggactcctggctgtggctgcctgtcaggatcacagagcagggacacgggcaccggcagagttgggctgacagattgaatcctgtctctcctacttactagctatacagatatcagtaaggttttgtcatctataaaataggggcaacactagrgatatacttygtatggtygttgagacaattaagagatttttatcacgtaaagcacttggaatagtttctggaacctggtcggtactatgtcgttgtccctcttcccatcccacatccacattacagatgaaaacatgggctaacgggttttctgcagggctcttcttagtctttcacattcaccttctgctggttcattttttcattgcagagtgaacactgataaaataaataatgtaattatcagattataatgatgattaacacagcgattctatttagaaatgtcataaaatagtgaaacatcctaagatacagaaagatatatgatcatgtacttctggcaaagaaggtgaaccagatgtggagatgatagtcatagaaggaaagccagtcatgattttggcaactgggatcaccttacatattttcagttggagaaaacctggagatttatttttcttttggtatcaatttctagaaacctgtcgtatgactaagagtttcccaacaatagggagagaacattattaaaatatgcttttctagaaaggcccaaatgactctgaataagaaactgaatattataatttaatgaggaaaagaaaatgaatgggatgtccagaaaattggggcggggagggggtagtttccatgcattttccctcctagaaagggagattaatggccattcttgtaatatctaaatggccaaaagaaacaatgaaaagaaaaataatgaatcagactctggggtttaaatcctgactctgccacttgccaggtggccttgggcaaatcactttctttgtagcgcagcttccttcactagaaaattggtatgataatggtacctccctcacagagataatgtatgtaaggtgtttagcctggaaaacaataattatcccaaagtgttacctcataattctttactgtaatgtcttatatcaactgacatctgagatgtgggacacattacccaaagttggtagtcttgatcactttgcggatgctggtcatttgcagtaaacccatagttctgtctcatttctggataagcattggccttcgaggaagaaggaaattggtttgcttaagaattcatattttgcagatgtgaactgactggctactgacaccaaaaccagttcccccaattaaaataaccctgctagcctcagcacattttgttcatgagctccctctcccgccatgaggcggctgcctgaaagtacttgactgccctaccctccactccccggggattgggacatgcttgtgaagagatacttgaggaagttaaagcaaggtcatctccattgcctaagccccacaccctggtaaactgcacactgtttggaccttgaaacttgtgagctgcgaattcctgtcataaatggagttttcctccctcctgtggccccagtttgtggtgagccttgtgttggcatggtggccatggggacacccctcgtgtgtgtgtgtgtaggcccccaaaaggagaagtgtagcagcttccctcagccttgcctcagaaagycgggtccagatggccaaggaagcacactgcattgaaggaactctgcagccagagtgaatttaccagtgtgggaaacaaaaacgttcgggttctggtctaaaattctgggagcaaaggacactgggattgcctccaccaaatgtcaacattttacttcttcccccacccccttctcagagcctcgagggcagcaaacatatgtgaggccagcattccattccctcccacgcaggaacatatgctgattcctatcaggatcctctgcttcccaaagaggctgatggagatggggagggaggaaagcataaccataaatcctcacactctgggcaaggtgataattgaaagcattctccaccatgacgtgctctccagtgccagggcagcaggcagctgggacagctaaagctggrgaaggcctgggccggggcccagctctccctctgaccaggtgaattttggtggtcaagtcacttctctgcctatgaaacgggaataaggattgtatccatgttgtgggatcaaaggaagcactttaagtcaaattcatcagatgcacttaggcactctggagttttcaaagcacctcagcatttctgtcttgtctcacttgattctttttgctcccctacttgcactctgttcctgctgtcactgaggaaacacagcagagtgtgaactctgaaagctgacccttgtttggtgtcttgaagcaatgcaggtcaaggagcaagactgaggaggggccttaatgagggtctctgagtgaggacctgggcccggtaaccagccctggcctgtttcatgcccaggctatcagccgcccctcctaccaagtctctctgaattaatattttgggtgtctcctcagacaacagctccaagcagatgaattatggcagttctaaagggtatttacatctcttctctctattcctcttgggaagcagggtgggggattaagtcagtcttaaaaactggctaaagggcattctccagaatgatgtcttctgagattaaaaggacacagagccacatcacaagatactaggtggagattttctaatacaaatgcatgcatgatggtacatggactgtctgcgggatctgaggagtctgtaattgcaggcaaaacagcaaatgcctaatacatgattttttttcaaatgttagcatatattaggatcatctgagagaggtttttgaaaatatggactcttgggcatcacctccaaagattctgattcatcaggtttgggatggggcctaggattctgcattttacaaagttaacagatgattctgatgtatagaaacatatgaatgccctagtaatttctccagagatccaatcccatgtcttgattttatatcaatgaccaagtaatctctctggaaaggccaacctacattttcccactaatttttttgggggggaaggagagttcaaacctacagaaaagttccaagaaaagtatattgaactccccatataccctttacctgatttttttttgtgtttttttttttttttttgagatggagtcttactgtgtcgcccaggctggagtgcagtggcgcaatctcggctcactgcaaactcctcttcccgggttcacgccattctcctgcctcagcctcccgagtagctgggactacaggcacccgccacaatgcccggctaattttttagtagttttggtagagatggggtttcaccgtgttagccaggatggcctccatctcctgacttcatgatccacccgccttggcctcccaaagtgccgggattacaggcgtgagccaccaagcccagctctttacctgatttttaacactttgcctcatttatttttatctcttgtatattagttaccaatttattttataatattgttaacttattataattatctttgctgaaccatctgagggcaagttacagatatcatatcctttcatccccaaatacttcagcatttatctcttaagaacaagaacttctcttacataaccacagtacaatgatctcacccaggaaattagtattgatacaatactattatataatatactggcaatattcaaactttgccaggtgtcccaataatgtactctatggcagttttttccaggatgcagtccaggattagacatggcattttagttgaaatgtctttttgcactaatggtttttaaagccattgatgttctcccagaaaaatttttcttcaagaacatatttcctaataaacaaatcatatttcttttctcttctgttcttactgcttgcaaagagccagtgatccaaagtgggcctgaagcaacagcaggcttacccaggcctgattcttcacaagctaaggcctgggcaaaggaccctctctcagccctgggtttgccttgtgagctgatttcctgaaggcaaaccacatractgctggtgtgtccccttgctgttcagtcaagtgggtggccacctggctttctccttgtcccaaagtacttcgttggatatgtaaagcgaccaaatgttacttcactgtagtttgaatcttacccagaaagagtkactggtaaaggacatgccactttgcacccttcccagctctctccaaaggcagctggctgaatgcacacttctgagggtgatgttttttccagcactcagggatatacccagtgtgagatcagaatcagcagctgtattcattctgcctcagccagtgccatctgaaacaaacatcaagtggtcaaaaaatgagatggtgaccatgtataatacacaagacttattagaattcaactctggtatccgcctgctgcctctgactctacaatgggagcaggaaagcaaagctcataccaggacagctgaaaggtgtggtctgaggatttcatggtgaacagatagaacacactgtgggggaaaaaaaacatattttatgcaagcatctttctggcttgtcttgaatgaagctaaatttaaagagaaagtgccacagatttctttaaatggttaggtttttgttttctttgttttattttgctagtatttacttaagggtaatatgtgttttctgtaatgagtgaatttatttttaattaaaaacttatttgcaaaggtcaagagatttcactacaagtcaccattcaggattttttttttcctttccttaagtagaaggtagcaaggggaaagctgtattggagaaaaggttcaggggcatggcctcctggagaatgttgggagttgagctgatgggaggagattgcttctttttattcagacaatctagttctgttcttcttatgcctactattgttttccttgccatctttgagaccttgatgatcgacactgcagacacagcagagaatcctagtacagactgaagcttttcktataaagtgagcatgctcactgtgattctggacagttcctacatagtatctctgtaggataacatatgtcttggttttctcagggcaagctcagtttatctctgttatcccagtataactattaaaatgtccccatttcattttcaaaaatgtcctggttggataagaacttaaagtattttgttaagactctgggaaactgaaggtattttctccctgtccatgagccagtggagttgttgagtgatttgtgctggtgcataccagtctctagcctagtggatggctcacccccgcttctcccctaccttgtgctatggaggatccatccctaactcttgcattccagaggttctgattgcctcacttcttcctgtcttctgcttcacatttcttacctttctcagtaacgagtttgctgagacttgsatcagcctaggtatgttgtgcaagtaaagcctctgkactgcattcactcctttcacctccagccaagagacatcaggaatgaaattttctgctttactaaagtgaagcagcccattctttaccagccaaatgccttcctcggtgggtaaatggtattagttgaagcagttattacatagttttatgcctcagatcctgtatttataaatctgaaagacgactaatagctttaaagtattttgagaatctcaaagctcagaagattataaataacaaaagatatattttttcgtatctaaaatggtagcacaaatactgcggttgcttacttaatagatagcgtgtggtccctgagccattgcagctgatgggttttttccagtgctctatttatagagctaggtcagaaatatcacttccgttggaacctgacctatagaccattgtcaattttagagacccaaggaagtagaatgcaccctaaatacagctggttcacagattcagttagtgaaccacaagccctcaaggaaattaattttgctggaagataaatgtctgagcctatcccagtctcttttctttgacacctttgtcctgtggtctcacagagcttgtaggtcatcttgaatctttattctaaaaataacctattataggcagtttcccagctttaataacttactcatcctcttcgccttttgttgctaaaattctgcattgaatggaacaagaactgatgacctgccaagagaggtaaccaagattctcagtcccttccccagttcaaatggatggtccaataaagaaccatgctcagcaagtgccaggggcctagttttaaacaggagaagctgaattgaatggatgatgaattgaatgaatgaattgaatccttctgatccctagtctcgcactcagactcccgtctttaagctttgttactatgaagttgtgtttgctgggacttggccactggtcagcacaggtttacccatcataaagtcttactaagtagggtagactaagaaaatctctagtctggagagaaatctgctatcagcaaaagaacccatgcctgtgctcttttcaagcacaaacgggtgctgggtagggcacagcgattcaaagacagcgcatggagtggtgcattctcaaacttcctggaacaagtgaggttctcgatgaggaactcattcatatcatcaaaataccaaagactcaaagttttttaataaggcaggaactattgaggtcatttaccccttcttgtcatggatgaggaaactgaggctcagtgaggttaggtaactgctcattaccaaggcctactctgaggttctttgttacactactctccttctcccacctggtctcatcaaaagcccagacggagtcagaaatagaactgcagggtcctgctttctagccagcagctggccacaggctatcatgcattacatggaatgtgcttcaggacgtgaggacaagagatatgaacgagaatgcagttccagtggtaacataccatcttcttccctggatttatttcaatcctgaaaacatttgtaggtattgttattcctttatttttttwaattycctctttctactctaaataaatgggctttcatctgsmrggactggagggaccaaatatccagaatatccagtccgctaaggccatgaacttttccttcccctctgttcctattttgggagtcattgctttgtttttttgacttttttttttttaacatggaaaagcattcttttaaagttgacccttttgctgcagggcaaatgcttttctgttatgcactagagattcagtttgatctcctagaaatgcttagcacaggagtcataaattgaaatgttttcagagaaggagctttctcattaagagctttccaacaggcctcttctaaatactgacacgggttggtaccagaagcccatcacctttttggaaatcaaggctacatagcaacctggttatcctcctccagtctgattgcacgagggctacaccccatgtatacagagcagagagacagctccttgccttgtgagaaattcgtcttcataaccaactcccacaccaaatgagtaaggaattggatccaaaagatagtcatgaaagatattccagaatccaaatcatgtgttttaaccactttgcaactaagatttactatcttgcctcattgttaacagaataaaaaatgcaggagataatgattaaacttctttcctccctagaatttcatcttcagtgtttgatcatcattgttcctgtmacttatacatatcaagtatcttcatctaagggtcatcaagaacctctggttgcctggaggccagaattattattcacattttacagatgggttagcaatcacagaaagagaacatgctttgacttacctaaaagagtctctgagagagtggagaatgaatgttcccacagtcttttacagagccctgacttcagtgtgagtagattagatttgctctatgtagcttacacagagacttctacaggctcaatcccataacaatgaaaatcctcaaaaatgaaaatattttcaaagctcagttcacgtatttgatttttgtatttgcattggaatwaaccaaattccagacaatgaagttatactgctttggcaggtctaaatatcacaatcatcaaaaaggagagagagggagtgagcacctcaatttttagaacttcctcttaaagtgaacatagagaaggttcacttatctgtttcctaaccaattaggtcatcttgcaggaaatcaccttttcttaaaagccagtaggcagattcctcctactttaaatttcccatcaacagcattaacaatcatttatgccagccctctcacaggaatgcttgaaagtcaaaagacataagagaccactaagttttctagtttaaaataaggtcacaactttatagtaacttacagtttccctacctccctctctcaagtgattctatcactgcaatcacccttcaattgctttcctatacttgaggccctattaagtaaactatctttccaatccttgccagatttttaattctacaaccagagaggatcagttccaggccacctgacttgcgtgaatccagctgctgggccagttgagtgagattaagtaacttgctgagccagagtatgtgctgtctttctggaaaccccttgccctgggttatcactgtacatcagaacagaggaagccragtatggagcctgagtgacatgcagagctcagatgagtgataagatcctcatgacacacttccatcggtatcctcccagagatgggcctttgagctctcaagactcttgtgggctggcagaataacacgttatttgacatgagagacatgataagcccagagaaagctaattggagtagtggttaaaactcagttggcctggtttcgaaccctggctgtgtcagtaactaaccatgtgaactggagtgacttagtttctcatagcctcattctgtcaatagggatgttaatattactcacttcataggattgttgtaaggatcaaaagagatgtagctaagatatgaagctcagcaagatttaagcttacatagtgcctagcacatagtaccttaaaaaatattgcctttccaccttgggcaacatagtgagaccctgtctctacagaaaaataaaaataagttagccaatcattgtggcatgtgcctgtggtcccagctactcggtaggctgaggtgggaggattgcttgagcatgggaattcaaggttacagtgagctatgatcatactactgcattccagcctgggcaataagggagaccctttctctaaaaaaaaatttaaaaattgcctttcattatcattaactttcaaggccttgctgttattacttttatggtggattaatatttgtaagaactcctaaaaatacaaatggatatttttaaagtctatagtagactacagtcaagcttgctcactcagggtttcctttggaaacttttctgtggtcatctgtactcatggcccttacttaagacttgggtttacctgtccagaaaacaaccaaatacatgggtacttttttatactattcttattgttttagcgacgcggagtcctttaaatagttgctcctggcccaaatgtggctccaatctctgaagacatcctgtgtcttcctttagacccgagaaactcctacagtttatccccaaaaaaaaaaaaaaaaaaaaaaagtttgagtgcttaactagcaactcctaattattcacatgtagctttttcttgacaaactttagagcttagcctcccttgatcccatcacttagcaggcatctaagcaactaatttctagagtttacttgaaaaatgtaaacctgttaattttagctaagcaagatagaattaaggatgtaaatctgctgccaaaacaaggatacaatatgattcaaaatttagtggaaataactttttaattagtcatttagtcagtattataagcatcctctgtgtctcagaccttgtgttaagtaactcaggcatgctgacatacatcaggcgtgggtttggcctctttataatatacagtcatatgtcacttaacaatgaagatgggttctgagaaatgcatcattaagcaattttgacattgtgtgaacatcatagaatgtatttacacaaactgagatggtatagcctactacaaacccaggctgtatagtatagcccattgctcctagtctacagacccattcagcatgttgctgtactgaatactataggcaattggaacacagtagtaagtatttgtgtatctaaacacatctaaacagaaaaggtacaataaaaatrgtaaaaggattaaaaatggtacacctgtgtagggcacttactatgactgcagcttataggactggagttgctctgggtccgttggtgagtgcacctactgatgaatgaacatgaaggcctaggacactgctgtacactactgtagacttcataaaccccgtatccttaggctatattcattgatagagacatttttctttcttcaataataaattaacctttgattactatcactttttkacttcataaatgttttaattttttaactttttgatcttgtaataacataactgaaaatacaaacattgcatagctgttcaaaaacattttctttatatcctkattctataatcttatttctgttttttagatttttttacctttttaaacttttttgttaaaaattaagacacagacacacacattagcctaggactacacaggatcaatatcatcaatatcactgtcttccacccgcccatcttgtctcactggaaagtcttcaggggcaataacacgcatgaagctgtcatctcctatgataacaatgccttcttctgcaatacctcctgaaggatcttcctgaggctgttttacagttaacttctwaaaataagtagaatatactctaaaatcatgattaaaaaaagtatagtaagtacatagtacataaaagtatagtaaatacattaaaagtatagtaaatacataaactacataaaagtatatatagtaaatacatcaatatagatatgataaaaagtatagtaaatacataaaagtgtagtaactacataactggtttttgtatttactaaactggttattataagtagaatagactctaaaatattgataaaaagtatagtaaatacatataataagatcaagtattatgtactatgcataaytgtatgtgctatacttttatacagctgagattatagtaggtttatttaccctgcatcaccacaagcatgtgagtatgcattgtgctatgatgttaccattgctgtgacatcactaggtgataggaatttattagctgcatgataatgttatggggccactgtcatatttgcagtctgtcatttgctgaaacatcattgtgcagagcacgactctgtattaaaggtgataagaaaagcacacaaataatataccacaggtagaaaatgattgtaatatgagacagtaaaataaagtattatagaagtttacaggaggaagacattatttctgtgaagattagagaaattggcacataggaagtagcattgaaggcagagtagatttgggacatgtgaacataggggagttccagatgagggagggacatgggaaataagtgattaagtaggaacacagttgtgggaaatggagcagggggaagaagtctggaagggcaggtgggcgcagggtagaaagtccttgaatgccagtgttaggaatttagaattctctgaagacacttgggagccactgaaaggttttgagcctgctggttgtaaatgggagggtggtgtgcttaggtgtgtkcttggaggaggttaatcaggtagtaaaacagaggrtggctttagtagggagaaagcsacagcagcacaracaacaggcaactaaagcagtyacaccaggtgaaagctaatgtgggtctaaggttgatttaggaggaatggagagtcaggaatggatctaagggtgaggtaggagaaatgaatggatggatataggtaggattttacagttaaatcagtaagacctctcaatttattgcaagtgagaagcatgagagaaggaaacattttgaaaatggagctgaggttttaaaccagattaactggagggtcaaaggaaggaacagagatggagtabatttatatgggaaaatatgagcttgctttgatgatactgaatttgcagtgctaaaatttatgatgtagrcttgcagttcttgtggttaaaagtggaagacaagtgttgagacaagccaaaggttgcgacaaaggcgtagaaaccatccaccttgtcaaatgggctctcatccttttcaaagtggagccatkccatgtagagcagacactgcaagcttgatgggaatgaggcatatctggctcaaaagcatgtttatttgtgtgtttttaaaagtgtaaatattgaaccaacattttaaaatcaggaaattatacttaaaaagcattgatttctggcttccgttttaaaaatcaaaattgcgctttaaagttagcgcaattaaaaaatcatatcactatgatttttaaaaatcaaaagatgtgattataaaagttttttacaattttaaaataaataaataagatgtgactaactatgaactcacattgccacatgacaacagctagagctgaacagagactgcccccttgagatcctggatgaattctcgaactcaccacagtactcaccacttcccctcatctcctaaggctttaattgaaagtcagttactaaatctatagagaaaaaaaaaataggttaatggttgccaagagctggaggtgggcagggaatgaggtgttggggactgatggccagtgggtgtgggatttctttttaggggtttgaaatgttctaaagttaattgtggtaatggctgaacatctctgtgaatatagaaaaagctgctgaactgtacacttgaaattggaggaggtatgatagcaaattatctcaatagagctgtttttctaaaatgcaaatatagttgctattgcccttgcagtgttgattttcttatagtagaaaatatttttctataagtctatttctatcaaaaaggggaaaatgaaaagttagactgagagggttgtgaatttcaagagaaatggtaaagactatatctcttagtgggggtgaagaagttctacatgttaatatgcaagcacttggcctctttactaatgtacattattttcctggatactgaaagcatctggtattagacaagaaaaaatgtggtcatgccccactccctaaggtccacccacaactaagaagaaagagaaaacaaaggcagaaaaaggaaaggagtaatcaacatggtaaaaggagaagcagaagaggccagtagattggatgccaaggaagggggaagctttatcaactgctgacaagaggtcaaggaggatgaggccagggaagtcaggaggtcatgggagaccatccagtgaggaggctgagagaggtgaagccagagagagatgcagaggcagctgacaaagtgctcagagtgcattgtttaggagatagtatttaatctcaggcatgaaggactactgaaggcattttaagtaggggaatgatgtgatcagatcggaacaatctagattatttgttttcacattaatttgtgcatattttgaattgtgtgcataatgaactgaggttaccccaaattttattctttcttacactaaattctctttcaatctgatatccccaggcttgttgagaccttggttattgatttccatctcattcattcctgttcctgcttgaaccaggaaatagatatatatggttggtgttatctgacccaggggttctcaacttcagcactgctgtattttgggctggataattctttgttgtaggatgctgtcctatgcattataaaatggttagcagcatcaccagcctctaccctctagatgccagtaacactgcgagttagacattgccaataaaatcaccctccagccaagaaycactgaactacatttgtctgttgcagcatttgggcccaggtgcttaaggccatgtgcagttagtagaccaccctgaaaggtgtctgccctggaaaaaaaaagaccaattcctactccacactgaggcgtacaaatcagatgatgtagtaaggggacaacggatgacacattcaaggcctcattttgttttagctaattcagtggacttcaacctctatgtagtctcctcatagaaaaaagatcgcatctggaggcaacaaggcacactaaatgtccaactgtgccctcctaaggttaggattcctgtcatggcctagggccaaagttggttcagaggaggccttgggcacagggcacaggggttcagaggaggcctcgggcacagggcacaggggttcagaggaggccttgggatgtgctggacatgatagtgggagctggcttctatgcagcaggacttgttggcttgccttcaagggggaaggagcaggtagggaacagaaagggttttctcatggtgatatcaagaagggtcagtaaagctttggagatgtaagatgcaatttggaggaggctaggaactcagatagagtttacytcagaccctcttccttataggaaagtcttagaaggtaaaggaatgtttctcttggaatagggatgtctaaaacagcttacctatgaaatgctgagatcttctagattcctttttttgcgttgtgtatacgggggggtgggaggaccagggaattttacatgtatatgccaccatttctatattgatagggaaaattgagttaagactcttgtctagctaaaaatgtctaacaactctattaaactaagactatttcataactggttcttattctgtggagtagcattatgccttagatattgaatggctagatttactagtagcaatggctctgagctatcttgcaatgcaacctctttttgatatataactctgttattatttggcccagtggtggtcactttcaccaaggctgaaggaaacccctgctggtttttagtytcatattccttaacccctctcctacttcactgattcctcaagttctgtggtaatgaactgagcctccragtactctctggactactggcaatgagtaatgtctggacttcatgtgaaatgccatctcaagaaagggcatctgaaagcgtgcttttaccatttcatttcaggcacttctggatccagctgtgtgatagccgcactaggaaatacctggagtcacagtgtgaatacccrgctgatcctccagtaccttgattcagagagaagacaggtgggtgctttgacagtattctctgactatgaaggtcggggaatgagatataccaagcaatctgagcgtcttctgaaaatgctggccgcattgtctgtcctgagccagcagcagctattagggcmtaaagaaaccagcatttctgcttgtcccaacaacagttataataaagtggggagacaagtcacacacaggaaaaaacataagaattgatcccacagagtcagcatttctctgatatttgtaagtgaccaaggaccacacctctaagggtatccaattctctatctctaaatgatcatttcacttagattgtatttgttgaggactaatttgtrtatgaattaaataatgatgatgctttttcttgaagtatgtgtactttgaaaatcttaggccagcagatgctgccaagtgaataaattattccccagatactaggtacttttacattaacgcatacacctgtagtgtaaagtactgaatgatgctagaaagacctccaaatggttggtcactttctcagagttccctatttgtggtttctatcctggccaaaactgaaaatccttcccttacatccagaaagtttactttctacctccttttaagtcttctgtcttcattcttcattccaaagaaaaggacaccactgtctgacctctttggtaaagctttggtaaaatgtttcrtaataaaaaaattctttttcctaatgactaacctcaactttatcctgctgtgtgaccagattcaatctagtttctcctaaaagcaggaggaagaagacgggtgattattttgattttttggataggacagaattcagaagccagatttgcccaccttgctaaatatatatcaaatccaggccatttagatacagaggcatgaaatgtcacactggtgatcctttctggagaaaatggcagaaaagctgttgttgcctttacctgcattaggtaaactggctctttttcaaggaagcaggaatcatcaaaaacaggcgtgagctattgcctgttctagacataattttccaaaccagagaattcttcttggtttgctttggactatgtaaataatattccagcttggtgatcacgtcagccatgtcctgagaagatagagctgcttgtttctattcagggaaacattcttgagttttcaggccctggactactcattacctcaatggcaccttttccctgaagagtctggtatcctaggttctgaagctgttatttctctttttagtggaacacattccaaaatattcctggggaatctaatgacctttggtagtaaatcatgttaaatagctgtgttgcagctttcagggatatcattaaggattgttgaacacacctatgtaaactttatcagaggaagcaaaattccttgtgaatcaatgttgagtcattcgttttcatggatccttgatcccactccttgaaaacttatagtttatctctgtttcaggttttagattttagaagccattcttactgttacacacggaatttatgatttcatctattatatatggtatcatgggttcaaggctcccaaatcctagttttactaattccagttagaatttataagtgaataaagaaattagagccatatttttacttttcttttgttttaataaattaaccagtcagtgtcaacaggaagtagctggtaggacaaatgctattttttatgtctctttggtgactggaggatgttggtggctcttggcttttggctgataaggtcaaatgcaggccagtggtcataaggagaaccaggagcaaagtgtagatggatcagtgacagttcatcaactcccatcccattagatgggtcagtcatgttatcttaatttacaaaagacaacttgttactatcattactaatcaataagaagcagacttaaatgccttggaatcatgttttcaaacaataattagaaattaatgtaaaatatggccagtgttaaaatggccaacccaggcaaagaacatacatttaattaatctatagaaatatgcatgcctttggggaccagttgttaaatttgtgacctaataactagaataaagtttgatatagaaaaaacatgtctctgtctagtgaccttatcttgccttagcagagggtgtgcttagtgattccctgagtctttcctgtggtcttattttatgaaaaaccatagaagccatacgaagcgaaggcttttctgggatatgtgcataaaacagtactttaaagctaacctttaaggtaattgcaccaagtagtactttcttataacaccatttagtagcagaacgtgcctggataattctagggtagtaagacctctgggacaccagccacttagagaagataacaggtatagttttttgttttttagggttttttttccaatgcccaagcagaggccactacacccagggatcaaggttatgggatgaggattatattttatcccgtttctatgacattgagctctacaccagggctcttgaatgtaaggcttagtttcagatcacaggcctggaagggggtcaggtcaagctgagcagaccttcaagccgattaacccaagagctgaattgtgttgtctgagggaaggagtcctcyctggctgattattttctttacaccctggaaactttgcaaaattttataaccaagaaagaaatcttatcagggccacaagccaagttaattttcttgcttattctgcttcagtgtttgcaaaaactctcttaagaagctggaaaacattttcttttggactaatttagctttttttccatttgacttttatttactcttttcctactctgcttcaatcctgccccaccctttttgcaacatttttattcttaccaaagacatgttcttagagtagaattaaaatggcctctcctactttttgtagttgttgttgttttaaaccatcgaaaatatgttttggtctaccccgtgcatggtatggggatataaagaagtagaagactagttcctgccctcgaggtccaaacaaactaatactgaggtactgttacaaggcagtgtttgatttgttgtctaatgagtggttaaaacagtaactgctttgactctaaaggaaggtaacatcatcagaggcatattaagtcttttcaggaaaaggygagacttgagtattaccttaaaatcagtgattctcggcaggacgcagwggctcatgcctgtaatcccagcacttttgggaggccaaggwgggtgaatcgcctcaggtcaggagttcgagaccagcctgaccaacatggtaaaaccccatctctactaaaaaaaaaaaaaaaaaaaaaaaatagccaggcgtggtggcgcatacctgtagtcccagctacccaggaggctgaggtaggagaatcacttgaacccaggaggcaaaggttacagtgagtagagagtgtgccactgcactcaagcctgggtgacagagcaagactctgtctcaaaaaaaaaaaaaaaaaaaaaaaaaaaatcagtggttctcaaacctggctgcacttaaggctcatcacaggagcatttataccaatgccaatgccccaccctgaccagttaaatcaaaatctctgccagtagagctgagcatcagkgtttattttatttgtaaagctcccccatgtgattctaatgtgcagccaaggttgggaacctctgccttaaataatagataagattcaggtagtcagaaaggggaggtgctggggtagagtgagctgcagctgaagaacaaacaggaggataggctgcatcgtcagaggrcacaggctgggttttgccttgtaacaagagcagagggtttgggcactcattcatttgacaaacctttatttaatcacctcttctctgctagtcactgtgtaactagttgcgctggagattcaagaaaacaaaaacaggtaagagatggttgataccctctggttgttcacagtctacttgaggaaacagataagcatgtaaaccggacttgcagtaaragcacagtgaatgaagtaagtctagaggagatggggggtcctggcactaaggaaggttctctagcgatgaatgaggcagagcatgaggcagagaggagtggccgaggccttcacttgggaaactcttgctattacaaagtgccttctagcgagggctggaaaagctagagtaaggctggttatacttgaaagaaggaagaaaaactcgataaaaatattcacatttatacaatttctcctcaaatcctcatgaagtctggtcttacaaactacaaatgggattatataaattttcaagtgccctagaaagagtaatgaagtaaatgaatcctgactaagcctcacacccscttgatgaaataaatattatgactctcttatttcaacaaattggaaagaggtctttttttcatataggaggtttatttaaatgaactttctaataatattttcatttctatttaggaggcaccctgaaattatgggatgcttgaggggcgagcctgaagtacctagtaaattgttgacagaaccaatatcactcaagctgctgatccacacttgaatctgtaggcttttctcaaagtyctagttttgcatcttagaagtattgcatcttggaagtatttctttgcatcttggaaatattcaatgtttcctttctggtgataggattctcagtgtccattttatattttygaagactcaaatatcatcactgtgaagacttccctgacaccagctgtgatccgtccctcttccctctggcccacacttgcacctggcccttgtctctattcttagacttctgagccctgaattatgagccccttgaggtctataactgaatttatctgcataccctcaaatgtaagggcagtgcttgacacttacacagtagatacatttattttgaaagagagagagaaagcaagaaaaagaaatgcactccctgtagctactcgtgaacccagtctgaaggacgaaggactgcttatttagaatcattcttccgcatagaaattgagttttacaatttaaccattcctttaaaatgttagtaattgtcggtttaaaatgttagcatcaaaccttgacaattataagcagatacttaaatagaaatactgtaagaatactgaagataggaatactttttgcagaaccagcctgctgtagtctatgggaggatgggagtcaggcttcccctggaatcttatgggatagcctttgtgtaagcaagccagaaccctaaacacagacccaggctgagggagagaagggttctgcagctgctttcagggaccagatagcatgaggagggtaggaaatctttgttgctatcttctacaagtcttaacttctcctctctgtggttggacaggcttaatgaaagactgaataaccaaagaaaagttgataaattttttttcccagataagctaaagggtagatgtggggcagcatgtcaggcttatattcatattcacccaaagaaagatatcgaggatgatgttttacctgatgtaagtcatagttgtatatctccctactcctagattcctccaaagaaggattcaggcttagttgccctaactcaaaaggaacctctctcccttggtggcatggttccaggtcgctgtacttgttctcttgttttctactccagctcacctgctgtttttaggcaaggaggattatgtgagtatgtgtgtgtgtgactagatcccgccagaggagaagttcggctgtgctgcaggggtagatgaaaactctttttaagcataaatacctatagaaatagcaaagggaacataaaatccagtcaagtacattatcttgggtataaatgtctcctccctttccagagctgctcaagtgtgaaatccaagcccctgcccacactcttgcaacagaagtgctctaacaggtattaagtggattggggaaataaataaaaggggaacccagaatggtggcattaaaagaatcccttttttcaggcaatgtattggcactaggcactaggcaaatgtattaaaatctgaggaaatcctacggaaagtgtgtggtcccagtgaatgaatacaatgagctgctactcacagtgcagggactgagaaagggcaacacagacacccaagtggtcatctcccatttccatctccacatttgagataagaatacctgtatctttcctaccacccacaaacaaacaagcaaaccatgggactccctttgaaaaaagtcaatatatccaagaaatcactrtttctgaatgagctcaagtagagagaactttctcttaagagggttccgytggaaattgccagctgaaaatacacaggtacaatgactcccacgctggagatgaagggtcccctttcccatgctttgaccacgatagaccgtgtacctttgctaaggtggagagtcagtctttcctaggagattttgagccaaataaaataaaaacaaaacacgggtgagagaaccaccatgatgttttaaaaggcgaaagatttacgcgatttgaagagaaaccagagtataccaccatgatgttttaaacatcattttttatcaaatatagttacaaaattaaccgttaccaccatttcaaaaaggtaaaggcactttaacaccaaaaagtagaaaggacatatctagaaggaagaatacatgtattgatatatttaaactgaaaacatttctttttatggcagacttagcacatgtccttacttctctctttgaggcgcatgagctctgaccatcacaggacaaatgactggtcctcttacagagcatgtaggtggtttaccctttaatgagccactcatttcactagcattttatcacctctgttgttctcctccagctctgacttattttatttttatatgctgtttgtctggtaccaattccccttgtgcagtgaccctgcctgctctaacttgctaagtaaactaggccaaatacctgggcaggagatttctagagaaatctgagcagttgcaggaagtagaagagacacagggctttggaaccaaattgaagaccctgttgtctggcttgggaagaaaaatattttcagttgggaaacaacatcggaaacagctatgagatctcttggacaaggcgctgccctgaaagtcaaggaccttgaaatttatttggctcatttgagaatgaagattggacaggatgttttattttagccttagctggttagctgtgagtgagaagaaaatgggcaacctcattggctagggaaagtaaaaaggaaagaagggttcaatacctgcctaaactatgaactgatttacaaatgaatcagcactttcactagaacaaaaagcatttagaatatgacagtgcccatctgagatacagtctagagatcatcttctccagtgagtctcaagtacagtaaatttaaaaatcccaggtgtttgtgaacaatgaagatcccaggccccatccccagtgctgtattcagtgagggcagtgccaagcctaggatctgcggtttttagcaagcactttgggtgattcttacatgggtgttcttcagtttcatactccattctagcccctttgttttacagatggcggtaagcaattgatattaactaatttattcagggtcacacaactagtaggtagcagaaatggaacagaaattcaattctttcaattctgaatgtgttgctattttcactttactctggtgacttttagtagatagattctaggcaaaaaagtccccaaacccaatcaaattattgggtttgcaggtgatatatttatatctctcatgactttcagtggtttataaagagctcctaaagaactgtscaggaaaaaaaaaaaatttaagcaccatctcaccccacattgcaatcaattacaagataaaagtcatcttttaaattcttgaacccaaatctgaatatgtggctttttccaagttaaacttcacagtgagcatgaactccccagtcaagtgactttccttatagacaacatcctgccacagggctggctatgctaccgctctcctacagacagccatttgtgctcatggacatctcccttaaatcctggcttcctagtccccatcttcataggctaaaggtgtgtaatgggagaaccaactttgtctgatcttgcgagcatgggagctttttggttatcacatttttgagtcagtcaatctttattttgaaaaagcagggcaggacagagggaggaagagaggctgagggcaggcagcagcctgtgtgggaacccatttcctgccatcctagggtcccatagttgataatggacaacatccttgcttggttcttgtgcaccaggtgatactaatttaaattcctctttattttctagtgatggaaaggagttagcctttactgagtacctatgagtttgcagggatcatttttgaccctttgtgttttatttccatcaattcctccaataacccttcagcatagatctgatcatctctatttttacaaatagaagaacttagctgataacataaataactcatattcagtgatagcatcaatatttgaaaccaagtttgtatagttccagaccctcagttctttttcctgtaccatgtgctctgagatgtaagatggtggttgtgttaccggaaagggatctcaatccagaccccaagagagggttcttggacctcatgcaagaaagaatttggggtgagtccataaagagtctactttgtgccagagttcataaagtgaaagcaagtttattaagaaagtaaaggaataaagtatggctactccacagcacagcaacccgaagagctgctggctcgctatttttatgggttttttttttattatatgctaaacaagaagtggattattcatgagttttcctgtaaagaggtgggcaattcccagaactgggcgttcctcccctttttagaccatatacggtaacttcctgatgttgtcatgccatttgtaaactgtcatgatgttggtgggagtgtcttttaacatgctaatgcattataattagcgtataatgagcagtgaggacaccagagatcatgttcatcatcatcttggattggtgggctttggccaacttctttactgcaacctgctttatcagcaatgtctttgtgacctgtatcttttctgacctcctatctcatgctgtgacttggaatgcctaacctcctgggaatacagaccaataggtctcagccttatttttacagcttgttttcaagacrgagtcactctggttcaaatgcctctgacagttatcactgttttaatttaggaataaaatgaggtgctagaaaaggaggccttgacttggtgatgattcygctgggttgcaatgaatggtccttattatcttcctctctgactttcctgaacgatgattagacctagaatgtcatttggtttacctgtaaaacttagtgagttatgtattaggatagcmcctcccaccctggggcaggaacatgaaagcagtgagatgaggagcttcttcttgctttttttctcttgctctaggcattatttgactttgaaatactcctggcattttcctgtgattctgaagtgccccttcctctgcttgtgtgtgtgagatttgaaagcttatcacacatgtggctaaagcaggtccagcttggagcattcgtcttctggctgctgttgctgggggagtatccctgctgtgagatgctaygccgcctgagcctgtggcctctgcttatctcctggggtggctgtggctgtgaggtgcacagcatggtacaatgctagttttcatttcaagtcctttcttgatgtcactgatgggtgcaatgagtggagtggggggacctcaggcccttccaaattctttcttttttgttgttgttatttagtttttatttcataatcataaacttaactctgcaatccatctaggcatgggagggaacaaggaaaacatggaacccaaagggaactgcagcgagagcacaaagattctaggatactgcgagcaaacggggtggaggggtgctctcctgagctacggaaggaatggtctggtggttaagataaaacacaagtcaaacttattcgagttgtccacagtcagcaatggtgatcttcttgctggtcttgccattcctggacccaaagcactccatgcctccacaatattcgtgccttctttcactttgccaaagagcacrtgcttgccatccaaccactcactcttggcagtgcagatgaaaaactgggaaccatttgtgttgggtccagcatttgccatggacaagatgccaggacctgtatgctttaggatgaagttctcatcttcaaatttctccgtgtagatggacttgccaccagtgccattatggtgacttcacagtcaccaccctgacacataaaccctggaataattctgtgaaagcaggaaaccttataaccaaatcctttctctccagtgctcggagcacgaaaattttctgctgtctttgggatcttgtctgcaaacagctcgaaggagacatggcccaagggctcgctgtcgacggcaaattcaaagaacatggtggggttgaccatggctaatagtacacggttttcctcagcggtggcgtccgcagagcacccaaattcttaatagcttataaaattaggggtagaggaggttgggtgcggcggctcacgcctgtaatcccagcactttgggaggccgaggcaggtggatcacgaggtcaggagtttgagcccagcctggccaaggtggtgaaaccccgtctctactaaaaatacaaaaattagccaagtatggtggcagacacctgtaatcccagctacttgggaggctgaggcagggaattgcttgaacccgggaggtggaagttgcagtgagccaagatcgcaccactgcactccagcctgggtgacatggcgagtctccatctcaaaaaaaaaaaaaaaaaaattaggggtagaggaatgggaagcagacaaaaggtttacattgtggaggtttgaggagaaatgaatcaaataagtctctagcattctgtttgactttatgttagtctgattatgttaccataacattttatgatatgctacacattatctgatgggtgattaattttcaaatgtaatacaaatcattgagctttcctgatttctgccgctgtaaataatttggaattttcagttactgcaaagttgacatagtcactccttccttcctgtaaccttcaccttaccttgttgtcccctccctgcccccaagcttccctggatttttaaatcagccagtggctcctggcaactgtcttagaatgcttgaagccgaggttttttttcactgagggtctctttctagaagtttctcttcttaccttggcagagcttaagagttcttgcatctcagacaaagactgtgtgtgcttgactgttggacattcattttattgttacaaagggaccatgattttgagaacacctttggagagcccagctcccatggttgtatcccactgcccattttctgaatcctcaactcagaattggcaatgaaagagtgaactgggattatgatctgtgattctctaacagaattctctgagagtcaaactccagaaagaggctcatctttacaaaccttaaagaattagagctaaggcacctggtatgtctgggagggattgaaaacaatccccccaaagccccagcggccctggctctctggttgctatgctgagttgattcatccatttattgagagtctactttgtrccagttattctgctaagtgctttgtgggcattttctttttcaagcctcacgaaaactctgaggtgggtattactagatatactttacaattggagcacattgaacgttatggagtttgaaaattttgctctaaatcacatggttctaaggggcaaagccagaactttccttttcctttgcctctccctcccccatcacatacatacactccctcttttatatccctaggttcttaacctttattctacaatgagtaccatgttcatgtaagattattcatgcatgttacttggaattaattgcagaacaattttttttcaacccctgtggtgtggtcaccttcaatacttatacttggtggaatactcccttcaaagagtggaatgatccattgctttgagagagctttttcgatctctgttaagtaatgattagttatttccttataactgtgtggctctgtgtggcaacagaacacttttgaggaagaataaactctacaggacatggtcttctgaatctcaccattcaatcaggggaagttctggttcttcttctctgttccaagtactagcctttccagccagcaccttttctgtgctctgggtttggcttcagtgttctgtcatttatcgtcaaagaagaaagagaagtctctgtggcatcttgcccacagtggggacggacctgtgctcacctctctcctccagtaagaacctaagggcccaggaggtatagtggtgcctcccatagatacttcccttccctcatggatgatacagaatgacatataaatgatatctatttcttcatttttttccttgcaaagtcacttttccacatactaatccatttcacggtttatctttaaatcctttctcagttgtctattcttctctgaaagtattatcccagcatcctaatgaagattccatcaatgtctagtaaaatgacaaaactctctagcagtactatgttttgtttttggttttggtttgtttgttttgtttttactggtgcctctttataataaaaagatttggtggctccagcacagcttctaacccttcaacagctgtgcctataccaagctgttctctcttatttgtaactatttatgcagtgttctctccagatatactgttccatactgacctgcattggaatgttaggctcttctttgtgactgatctctatttcctacttgtgactccgttctgacactacctttgcctttttataccatcctccctacttttctcatgtagatttgctaaaagatccccatgactccaagatccctgtaactggctctgctgagtctgtcagcatttgatccctttgacttgaggaggccagtccttctcaggaaccacctgtaatctcttttttttccttagagacagggtcttgctgtgtcgcccaggctggaatacagtggcatgatcataactcactgcagccttgaactcctgagctcaagcaattcttccaccttagcctcccaagtagcttggactacaggcacataccaccacacctggctatttttaaaattttatgtagagatggggtcttgctgtgttgcccaggctgggcttgaattcctggtttcatgtaatcctcctgcctcagtcatccaaagggctgagattacaggcatgagccacagcacctggcctatacctataatctcagtttgaattaaacagtagtctctaggacccctctgtgtaggggatcttgttacatgttgtggttgttcaaaggccaagtattttcaaagaaaacccactgagataagttggatgagtgactgccatagcagtcaatatgacacctttgtcactttttttcatatcctaatagtctaatatttttcctcaagaaaaggtatatgctgcggtttgaatgtgtctccaaaacagcatacttaagtagtagtttacttaatggccattataaactattaaaaggtaggacctgtaagaggtgatcagcccatgagggscctgccctcatgaatgattaatgccattatcaagagaagtgggtttgttattgcaggagtaggttctttataagaagacaagttcagcccccatttgtctctctgtcaccctctctttgcccttccaccatgcaatgatgcagcaagaaggccctcaccagatgctggccccttgattttggacttagcccccagaactgtgaaaaataaatttctgttcattgtaaattatctagtctgtggtatttggttataccaggacaaaatggactaagacagaagattggtactaggagtgtggtgattgttataataaatacctgaaaatatggaagtggctttggtattgggtgatgggtaaaggctggaagaatctggagtagcaggctaacaaaagcttagattgctataaatggagtattaacagtaattctggaggactcagaagaagagaatgagaaacttcttagagattacataagtgattgtgatcagaatgttagtagaaatagagacagtaaaggccattctttttctttctttctttctttctttctttctttctttctttctttctttctttcttccttccttccttccttccttccttcctttctttctttctttctttctctctttctttctctctttctctctctctctctttctttctttctttttttgtttttgagatggagtttcactcttgttgcctgggctggagtgcaatggcacgatctcggctcaccacaacctccgcctcccaggctcaagcaattctcccacctcagcctcccgagtagctgggattacaggcgcccaccaccacacctggctaattttgtatttttttttttttggtagagacggggtttctctatgttggtcaggctggtttcgaactcccgacctcaggtgatccacccacctcagcctcccaaagtgctgggattacaggcgtgagccaccgggcctggtcagtaaaggccattctgatgaggtatcagacagaagagatgaatatcttattggaaactgaagtaaaggccatgattgttatgaagtggcaaacaacttggttgaattgcatccacgccttgaggtcttgtgaaaagcagaatttaagagcaatgaactaggatatctggtagaagaaattttaaaccatgacatcgaagaactgtgcggcttcttttaactgcatacagtaaaatgagagaagagagaaataatttaaagatgggatctataattaaaagggatctgaaggattctcagcctggttgcctggtagagaaagaaagagagcattttctggagaggaaatgtgtggctaagcaaccatttgataaggagattagtatgaatagaagaaagccagatactattcatcaagacaatgggagaatgaccccgaggggattttggagatttttaaggctgcccctcccatcacaatcccggagctctaggagggcagatggtttccagggacagacccagggtaccatccacaggctgactttccagggccactcaggacgctaccttctgcatcccagaggrgcatttctctgccacccagtcatagctcaagcaggcccaggtgtgactcatgttgccactctagaggcacgagtagtaagccttggtggtgcccacatagtgctaattctgcaggcatgcagaatgtatgagctcttaggccatggtagcctccacctagatttgaaaggatatattggatagcctggacatccaggcagaaatttatcacaggggcagagccatggcagagagccccatctagggcaatgcttactggaactgtggggttgcagctgccayagrgagtcccctctacacctagtataggtgtcatggcagggtcacttgagactccagaactgcagagcaaccaatgtgcagccccagcctcggacagctgaagcagcaagrctaacccgtaagagctgctgtgagggtgagactagcaaagccatggggttggagcttcccaaggtcttctgggtacaacccctgccttagtgtgaacagaaggtggaaatggagtaaaaggaggttattctggagccttatttgaggttgttttccctgttgagttttggactaacttgggatcagttactcctttcttttttatttctcccttttggaatgggaatgtctatcctatgcctttcctatcattgtattttggaggcacataacttgtttaattttataggctcacaactaacagggaatttgctttaggatgaatcatgccttgagtctcactcatatatgatttagatgagactctggactttggacttttaagttgatgctagaatgagttaacactttgcagctattgggatggaataatgtatttatatgtgagaaggacatgaatttggggggctggggccagaatgctatggtttgaacatgtcccaaaaaatacatgtgttggaaacttaatgaccattgtgatagtattaagaggtgggatctttaagaattgatttaggccataagagctcatctgtcatgaatggattaatgctgttattgtgaaagtgagtttgttatcacaggagtgagttccttataaaaatttgagttttgtttctttttcaccttctctttgcccttccaccatgggatgatgcagcaaaaaggccatggcaagatgatgtcctctcaatcttggactttccagcatacaggactatgagaaataaatttctgttcattataaattacccagtctgtggtattcagttatagcagcacaaaatggactaagacaatatgtattacaacttaaaatatttagtaataaatcttctagagactgtaattgtaataataatcctttgtgtgtcctctagccacagacacaatcctcttctaactcttccaatttttttgcattttaaattttttttaatttttactttttattgtggtaagaccacttaacatgagatctatccttttgacaaacagtctaagaacacagtaccttattaactgtatgcacattgtcatacagcagatgtctggaacttattcgcattgcataactgaaacggtgtatccattgaaagagaactccccattttccacttctcccaatccctggaaatcatcattcatcattctactctgtttctatctttttgactattttagatacctcgtaagtggactcatataatattcgttttctatgactggcttatgtcacctagcataatgtcccccaggttcatccatgttgcatatggcaggattttctttatatatatatatatatatatatatatatatatatatatatatatatatatatatataattattatactttaagttctagggtacatgtgcacaaggtgcaggtttgttacatatgtatacatgtgccatgttggtgtgctgcacccattaactcgtcatttacattaggtatatctcctaatgctgtccctccccactccccccaccccacgacaggccccagtgtgtgatcttccccttcctgtgtccaagtgttctccttgttcaattcccactatgagtgagaacatgcagtgtttggttttttgtccttgcgatagtttgctgagcatgatggtttccagcttcatccatgtccctacaaaggacatgaactcatcattttttatggctgcgtagtattccacggtgtatatgtgccacattttcttaatccagtctatcattgatggacatttgggttggttccaagtctttgctattgtgtatagtgctgcaataaacatacgtgtacatgtgtctttatagcaccatgatttataatcctttgggtatatacccagtaatgggatggctgggtcaaatggtatatctagttctagatccttgaggaatcgccacactgacttccacaatggttgaactagtttacagtcccaccaacagtgtaaaagtgttcctatttctccacatcctctccagcacctgttgtttcctgactttttaatgatcgccattctaactggtgtgagatggtatctcattgtgattttgatttgcatttctctgatggccagtggtaatgagcattttttcacgtgtctgttggctgcataaatgtcttcttttgaaaagtgtctgttcatatcctttgcccactttttgatggggtttttttcctgtaaatttgtttgagttctttgtagattgtggatattagccctttgtcagatgagtagattgcaaaaattttctcccattctgtaggttgcctgttcactctgatggtagtttcttttgctgtgcagaagctctttagtttaattagatcccatttgtcaattttggcttttgtggcccttgcttttggtttttagacatgaagtccttacccatgcctatgtcctgaatggtattgcctaggttttcttctagggtttttatggttttaggtccaayatgtaagtctttaatccatcttgaattaatttttgtacaaggtgtatggaagggatccagtttcagctttctacatatggccagccagttttcccagcaccgtttattaaatagggaatcctttccccatttcttgattttgtcaggtttgtcaaagatcagatggttgtagatgtgtggtattatttctgagggctctgttccgttccattggtctatatctctgttttggtaccagtaccatgctgttttggttactgtagctttgtggtatagtttgaagtcaggtagggtgatgcctccagctgtgttcttttggcttaggattgtcttggcaatgtgggctcttttttggttccatatgaactgtaaagtagttttttccaattctgtgaagaaagtcatcggtagctttatggggatggcattgaatctataaattaccttgggcagtatggccattttcacgatactgattcttcctatccatgagcatggaatgttcttccatttgtttgtgtcctcttttatttcattgaccagtggtttgtagttctccttgaagaggtccttcacatcccttggaagttggattcctaggtattttattctctttgaagcaattgtgaatgggaattcactcaggatttgactctcggtttgtctgttattggtgtataagaatgcttgtgatttttgcacattgattttgtatcctgagactttgctgaagttgcttatcagcttaaggagattttaggctgagacgatggggttttctacatatacaatcatatatcatctgcaaacagggacaatttgacttcctcttttcctaattgaataccctttatttctttctcctgcctgattgccctggccagaacttccaacactatgttgaataggagtggtgagagagggcatccctgtcttgtgccagttttcaaagggaatgcttccagtttttgcccattcagtatgatattggctgtgggtttgtcataaatagctcttattattttgagatatgtcccatcaatacctaatttattgagagtttttagcatgaagggctgttgaattttgtcaagggccttttctgcatctatcgatataatcatgtggtttttgtctttggttctgtttatatgctggattacgtttattgatttttgtatgttgaaccagccttgcatcctagggatgaagcccacttgatcrtggtggataagctttttgatgtgctgctggattcagtttgccartattttattgaggatttttgcatcgatgttcatcagggatattggtctaaaattctctttttttgttgtgtctctgccaggctttggtatgtggatgatgctggcctcataaaatgagttagggwggattccctctttttctattgattggaatagtttcagaaggaatggtaccagctccttcttgtacctctggtagaattcggctgtgaatccatctggtcctggactttttttggttggtaggctattaattgttgcctcaatttcagagcctgttattagtctattcagggattcaacttcttcctggtttagtcttgggagggtgtatgtgtccagaaattcatccatttcttctagattttctagtttatttgcgcagaggtgtttatagtattctctgatggtagtttgtatttctgtgggatcagtggtgatatcccctttatcattttttattgcatctatttgattcttctctcttttcttctttattagtcttgctagtggtctatcaattttgttgatcttttcaaaaaaccagctcctggattcattgattttttgaagggttttttatgtctctatctctttcagttctgctccgatcttagttatttcttgccttctgctagcttttgaatgtgttgttcttgcttctctagttcttttaattgtgatgttagggtgtcaattttagatctttcctgctttctcttgcgggcatttagtgctataaatttccctctacaccctgctttaaatgtgtcccagagattctggtatgttgtgtctttgttctcactggtttcaaagaacatctttatttctgccttcatttcgttatgtacccagtagtcattcagcagcaggttgttcagtttccatgtagttgagcggttttgagtgagtttcttaatcctgagttctagtttgattgcactgtggtctgagagacagtttgttataatttctgttcttttacatttactgagaagtgctttacttccaactatgtggtcaattttggaataagtatgatgtggtgctaagaagaatgtatattctgttgatttggggtggagagttctatagatgtctattaggtccacttggtgcagagctgagttcaattcctggatatcctagttaactttctgtctcattgatctgtctaatgttgacagtggggtgttaaagtctcccattattattgtgtgggcgtctaagtccctttgtagttctctaaggactcgctttatgaatctgggtgctcctgtattgggtgcatatatatttaggatagttagctcttcttgttgaattgatccctttaccattatgtaatgaccttctttgtctcttttgatctttgttggttgaaagtctgttttatcagagactaggattgcaactcctgcctttttttgttttccatttgcttggtagatcttcctccatccctttattttgagcctatgtgtgtctctgcatgtgagatgggtcttctgaatacagcacactgataggtcttgactctttatccaacttgccagtctgtgtcttttaattggagcatttagcccatttacatttaaggttaatattgttatgtgtgaatttgatcctgtcwttatgttagctggttattttgctcattagttgatgcagtttcttcctggcatcgatggtctttacaatttggcgtgcttttgcagtggctggtaccagttattcctttccatgtttagtgtttccttcaggagctcttttagggcaggcctggtggtgacaaaatctctcagcatttgcttgtctgtaaagtattttatttttccttcacttatgaagcttagtttggctggatatgaaattctgggctgaaaattctttctttaagaatgttgaatattggcccccactctcttctagcttgtagagtttctgctgagagatcagctgttagtttgatgggcttccctttgtgggtaacctgacctttctctctggctgcccttaacattttttcctttatttcaactttggtgaatctgacaattatgtgtcttggagttgctcttcttgaggagtatctttgtggcgttctctgtatttcctgaattgaatgttggcctgccttgctaggttggagaagttctcctgggtaatatcctgcagagtgttttccaacttggttccattctccccatcactttcaggtacaccaatcagacgtagatttggtcttttcacatagtcccatatttcttggaggctttgttcatttctttttattcttttttctctaaacttctcttcttgctttatttcattcatttgatcttcaatcgctgataccctttcttccagttgatcgactcggctmctgaagcttatgcattcatcacgtagttctcatgccatggttctcagctccatcaggtcatttaaggacttctctacactggttattctagttagccattcgtctaatcttttttcaaggtttttagcttctttgcgatgggcttgaacttcctcctttagctcggagaagtttgatcatctgaagccttcttctctcaactcgtcaaggtcattctccgtccagctttgttccattgctggcgaggagctgcgttcctttggaggggragaggcactctgatttttagaattttcagcttttctgctctgttttttccccatctttgtggttttatctacttttggtctttgatgatggtgatgtacagatggggttttggtgtggatgttctttctgtttgttagttttccttctaacaggaccctcagctgtaggtctgttggtgtttgctggatgtccactccagaccctgtttgcctgggtatctgcagcggaggctgcagaacactgaatattgctaaacagcaaatgttgctgcctcatcgttcctctggaagcttcgtctcacaggggtacctggccatgtgaagtgtcagtctgcccctactggggggtgcctcccagttaagctactcgggggtcagggacccacttgaggaggcagtctgtctgttctcagatctcaaactctgtgctgggagaaccactactctcttcaaaactgtcagacagggacatttaagtctgcagaggtttctgctgccttttgttcagctatgtcctgccccccagaggtggagtctacagaagcaggcaggcctccttgagctgctgtgggctccacccagtttgagcttccccgccactttgtttacctattcaagcctcagcaatggcaggtgcctctcccccagcctcgctgctgccttgcagttcaatctcagactgttgtgctagcaatgagcgaggctccatgggcatgggatcctccaagccaggcgtgcgttataayctcctggtgtgtcatttgctaagaccattggaaaagcgcagtattagggtgagagtgacctgattttccaggtgctgtcggtcacagcttcccttggctaggaaagagaattcccygaccccttgcacttcccgggtgaggcgatgcctcgccctgcttcascttatgctcggtgggctgcacccactgtcctgcacccactgtctgacaagccccggtgagatgaacccggtacctgagttggaaatgcagaaatcacccgtcttctgcattgctcatgctgggagctgtagactggagctgttcctattcagccatcttggaaccgccccaccacattttctttatccatttatttgttgatacacctttagattgtttccataccttggctattgtaaataatgctacaatgaacatgggtgtgctgatatctctttgggataagtttacaagttttaaaatataatttcaacttttattttagattcaggaacatatgtgcaggtttgttacatgggtatgttacgagatgctgaagtttgaggtgcgaataatcccatcacccgggtagtaagcatagtaccccataggtgttgttttaaaccctttcccccatcctcctcttccccatctagttcccagtgtctattattctcatctttatgtccatgggtaccctgtacttagctcccacttataagtgagaacatgcggtatttggttttctggtcctatgttaattcacttaggataatggcctccagctgcatccatgttgctgcaaacgatatgacttcattcttttttatggctgtatatgtaccgcattttctttatccagtccaccattgatgggcacctaggttgattccatgtctttactattgtgaatagtgctgcaatgaacatctaagtacatgtggtttttggttttttttttttttttttgggagaacaatttattttcctttgggtatatacccagcaatgggattgctaagtcaaatgatagtttttaagttctttgcaaaatctccaaactgctttctacagtggctgaactatctacattcccaccaacagtgtatgagcattttcttctctccacagcctcaccagcatctgttgctttttaactttttaataaagccattctgactggtgtgagatggtatctcattgtggttttgatttacatttctctgatgattagtaattttgagcattttttcatgtatttgttggctacctgtgtatcttcttttgggaactgtctgttcatgtattttgcccattttttaatggggttatttattttttgcttgttgaattgtttaagttccttatagattctggatattagacctttgtcagatgcatagtttgtaaatattttctccaattctgtaggttgtctgtttactctgttgttagtttcttttgctgttcagaagctctttaattaggttttgtttgtcaatttttgtttttgttccatttgcttttgagggcttagtcataaattctttctcaaggccaacatcagaatggtatttcctagattttcttctaggattcttatagtttgagggcctacatttaagcatttaatccaccttgagttaatttttatatatggtaaaatgtaggggtctagttttattcttctgcctatggctacccagctatcccrgcaccatgtattgactagggagtcttttccccattgcttatttttctcaactttgctgaagatcagatgactgtaggtgtgcagctttatttctgaattctctattctgttccattggtctgtatgtctatttttgtagcagtagcatggcgtttgggttactgtagcattatagtatagtttaaagtcaggtaatgtgatgcttctggctttrttatytctgcttaggattgctttgtctattcaggctgctttttggttccatgtgaattttaggacagttttttgtaattctgtgaagaattatgttggtagtttgataggaattgtgttgaatctgcaggtttctttgcacagtatggccattttaatgatattgattattctaatccatgaacatggaatgtgttttggcggggggatcctctctgatttcttttagcagttacttgtagttctccttgttgagatatttcacttccctagtttgatgtattcctaggtgttttttgttgttgtgactactgtaaatgggattgtgttcttgatttggctctgagcttgaacattattggtgtataggaatgctactaattttctgtacattgattttgtatcctgaaacttactgaagtcatttatcagctgtaggaggctttagtggagtctttagggttttctcagtatatgatcatattgtcagtaaagagggataatttgacttattgttttcttacttggatccctattatttctttyttttgcctgactgctctggctaggacttccagtactatgttgaataggagtggtgagagtgggcatctttgtcctattcctgttcttaaagagaatgcttctaacttttgcccattcagtatgatgttggctgtgggtttgttatagatgactctattttgagatatgttacttatatgcctaatttgttgaggattttttcatgaaggaatatggattttctcagaagcttccgcatctattgagatgatcatatggtttttctcttgaattctgtttatgtgatgaatcataaatatcgatttgcatatgttgaaccaaccttgcrcctcagaaatgaagcttacttgatcgtggtgaattaacttttttatgtactactggatttggtttcctactgttttgttgaggatttttwcacatatgtccatcagggcctgaagttttcctttttcattgtgtctttgccagattttggcttcaggctgatgctagctttgtagaacgtaactcttctatttttatctagacaagacaactaagtgttctttatgttgaacacctcccctttccctccattyctgcctcattttttcatccttcatatcctttctgggtacatatgtgtgccaaatgctgggaaaagtaagtcaaataaagctcagtttccttctatgaagagccatagtagtagaggagaatacccagtgttaatagagggaagcatacaggcaaataaatataagaaggaattgaaggaattgtggaagaggacagtgtagctatcgttgttgggatggtcagaacactcacaaggaagtgatggccagagaaggattcagaagagggtgtgatactggaaacaaaacttgaaaagtgcattggtatttgcttgatagatgaagtaggagactgaggaagatgtttgaacaaaggctctgaggtgggaactacaaatsgtccttctttagtgctacaggggagcactaaatgtgtctgtacaatgagtagggatcggggaggatggggcctgtatgtagttaaagataaagtaaggaaaggaaagacaaaccagactcagtcctgcaggttttcagaagccccactaaggaacttccagcaagcctgcgacatcagatttgtaccttccaagtctccctttggcaagagttttccatacagatttggagggatttgaaataagatgcaaagaaatgagggcctgaaccaagacagtggatattgagagggaaaagagggaagagttatgagatggttaggaggcaggatccacaacatttaagcacaaagaggagatctggaagggtgtgggaagggggttgttcctgaggcaaatgagtgagtggatgaggttttactcactgaaacaggctggtaaaggagaaaaaggaggcctgggagggaggcaagagctggccctgcttggaacatgcgttgtttcctgcttacgtggacagtgtatggctgcttccattcttccatccaggcctcaatgactgccatcaagaattaggttggagatcagaaatgatttcttataattgcacagaatctttagtcaacattttgtcttcccctgcctcccaccactgtttatagcacatcatgtcatctccactctcaatgccatttccttatttcggatccctggcttctgtatagagacaatggttatcagagtgtgggaaaaatgaaaagttaagagacgccttctgcagaaagggaagatgcaaactattttcagtaaagcgcctgagctgagagaggagagggccctatggagagctatgtctccctctccactgaattctagcaaatgtaaagtccaggggagtggcatcmgtagctaatttgcagaaataccagtacaggcttcaaagttttctgaaagacccacatctgcaaattgggaatcaggaatccttgctttcgtgggtcatgccagtcagtggattgtttgctctcagatccgctccctgcccttcccctgctctacttgataccacagggaactgacctttacaatttgcatttcccagtctccctttccattgagtctggttagtttggagaggagggatgaagggcagaagtatgagagaagccatgtatttttgtacacacacacacacacacacacacacacacacactctcacacacacattcctctgccttgcttccagtggtgtcccaggcagtgacattagttcctctccatgatccctttgctgtccccactctagttgggcagctccagcctctgggctctagtaacagcatctcatccttgattcctccagccctggggatggtggtagcttcttgttgttgctaatctctgggttgactcattgtcccctattttcatttcagctcttctaacacatttgtaactaattccccaaattgaatgctctctcttgaactaccaggatatgtcccattttactgatggaccttgacagataacaggtctacataagcaccctggttggtacatggttaatataagacccccaatctcttctctattgtccctgttcccccaaaggactcttctgtctaccatggttctccatccctcagagttgggctcctggcctggactgtcttgaagggcaaacatttgtgctgtgcttcctgaatggcatgagaaaaggagctcttttggcctagcctccttcctgtaggattttccaaaactttccagatgtatctaagctcaggaaacattttaatggctggaaataatgtctcatgggggttgggggtttgaaaccaacagaaccttctccaaaagaggtgtgttgaaatgttccagggtctgtatgcacacatccaaaccctgcccctcccctgttgaaagcatggcaggctcccaccctttaattggttcatgtcgtagaagagttggcattctctgaatgccctaatgacatggagcagaggaacagctccaaaggccagaactctctccaggagggaaaggattattaagcggttagtgatgyatttggattctaattcagattccacctcagattctgtaaagagactcctataaccctcttcttttgrccttatttggctagtaataatggttgtaagattgatctaaatcataataaatgttgtctaaggctgctcttactgacttaatgaattggagcattctgagttttttgtgaggataggcattatccaactgcagaatacatattgattctttttcaaacaggctgtggcttttactttgcaatgttgcccacatttcatgacaactttcagaacaaactctgttgagggatgaagattattgctatctgaatgcattcatcaaagaaaagtagaagtggaagaactatacttctgccttctcatattcttcagcattgggccaagagtagaaagtaaccatcatttcagccaggcacagtggctcacgcttgtaatcccagcactctgggaggccaaggcaggtggatcacctgaggtcacgagttcgagaccagcctggccaacatggtgaaaccccgtctctactaaaaaatacaaaaattagttgggcatggtggcggacacctgtaatcccaggtacttgggaggctgaggcaagagaatcacttgaacctgggaggtggaggttgcagtgaggcaagatcgtgccattgcattccagcctgggcaacaagagcgaaactccatctcaaaaaaaaaagaaagaaagaaagaaagaaagtaaccatcatttctagtctgtggggatcaaactccagaaattgctaaattattgcatgttctaatactacagggaacagctgaaacctcatccttttgagaactggacttgaatccaagccaatattgatttatttgggatgtgtcttgcaagtccacaaatgctttaacacagtaatcactaaccaggatacttatgtagttgtttgatgactcatagaactttatagaccttggggtcagatatatgttttatatgaaaagagcaagattttaatgaaaaggaagtaggtcatgtgcaacaatgtaactacagtttctgtgtctctgaagtgttcagttttgtatgacattgttagttctttcttctgaccaagtttccttcattagcctacaagggagcctatgaagtgaattcacagcaccagaaataacatgagaagaccataattttttaattatttcagagattaagattaatttaggccaggcacggtggctcacgcctgtaatcccagcactttgggaggccgaggtgggtggatcacgaggtcaggagatcaagaccatcctggctaacacggtgaaaccccgtctctagtaaaaaaacaaaaaattagyygggcgyggtggcaggcrcctgtagtcccagctactcgggaagctgaggcaggagaatggagtgaacccgggaggaggagtttgcaatgagccaagatggcgccactgcactccagcctgggcgacagagcaagactccgtctcaaaaaaaaaaaaaaaaaaaaaaagattaatttatggattctagtrtataacatacatacataaactactgtcttcatatgtgggtacctggaaaaatttttccattgcaaaaaagataatgttattctaaagtaaaattctagctctgtttctaattagatatgtgatcttggacaaatgactctgagtcacaggttcctcttctataagagaatttcatgatctagaagatgatttcactttctggttctatgaagaagaagcaatgccatgctatacctcagttactattttatacagtgggaaaagtctcattatcaacgggcgctggccacattgtttgtgctaaaccataggatataaccctaacactctgctcagttatttatttggctgacgacttcctcttgtaatacttcttgacaggtggtcagaggaatacctcttggaatccactkgcagagcttgttaaaaattcagattcctggacttcccagactaaatcagcagctttgggggtgggtctagaaatctgcatttctacattgctgggcaattcttaaagatacaaagtctgagatccatggccagtcaacagcacrtagtgttaatatattctatgatgtgaattactttaactctctttactctgcgtccagtctgcagggtcttagcccagggcctactactgactggatgatttggtcacaacctttctctctctaggactgttttcttatttatgaaatatggggtctggagtattagtctctaaggaatctttgtgttctaacagttcatgaaaatagttctctagcagcatctgagagagttactgaaactaccttaacaaatcctatttcttgagtgcctactatgtagtaggcattgtgctttttttttttttttttttttttttagctagagtctcgctctgttgctaggctggagagcagtggcgcgatttcagctcactgcaacctccgcctcctgggttcaagctattctcctaccttagcctcctgagtagctgggactacaggtgcatgccaccatgcccagctaatttttgtatttttagtagacatggggtttcaccatgttggccagcatggtctcaatctcttgagcttgtgatccgcccgcctcggcctcccaaagtgctgggattacaggcatgagccactacacccggccggtgcagcttttatgtatgtttcatttattctttatgctaacctgtgatattattattattattattattattcacacttaacacttaaggaagtggaggctgtgaaaagttaagtaacttgtccaagccgacttaatcaataagaggagctgcagtaaagtggaatgaaactggggctgtgaacacctaaagaatgacccaggttgttgctccccctgaaacttcacaaggcctgggcctcatgcagtgcactgctcattcaccctgtgttccactctcccagcaaaggagtcctggttttggtttctttcgatgtttacttggcctcttgcttaagcatttgcctttcctcctcaataacagtgaaaggactgaaaaataataaaataaagaaaagaaaatcccagggctggaaacattttgtttcctacaaaaagaatattttgcggccagctctgtggttgaaagtatttttcctgtggtctagggatgagttggatcccatctcttcttggccagggtctgagaacttagcctgtggcttcccatcgagtcagcacatagcatgctattttttgaacgagtgtctgatgatgttgaatgtgttcacgagtggacgaataggtctgtttgggtgtataagaaatgtgcgcatgtgcctctgactcttccagggcagaaggaacctgggagtggttttccacatgctatacatatcaacgtagcttttaagttttcatmactcacatgatgaccaaaaaaattcagatgctgacaaatgagaggagggtgatatgtgagccttatgtggatttgcaagtaatcagaaagccagggaatctaagattccctatcacatttctttccattttcaaatggaaaatgtcacatttctttccatttttcaaatgctcaaaaccaagacatggggttggttttattatggcagggtggtctgatggtaatgcagaagatgggaattctgagagctgccccagcttgtccaccttcagcctttgggacaccaactttgcctagccttgaataagtcactttttctcaaggactgcattttcctatatgaaaacatgaatttgtgtttaaaaaaaaaaaacaaaactttctgctttcaagaataaaagcttctctagtgagggatgaattttgaatattcaaaccgaattcatggataagaaatagtagtgctaggtaccttttctttactcataaagcattatgtactcatatttgtatgcttccagtatgactttgaagtgtatattagtgcctagaacttttcagcctgttctccatggcatggccttcatgattctatctcttacattcttgtaaagaatgaagaacgggtgttctctggactctcattgcacatggttttatgttcagttacctgctgactgcctccctgtcatgccagctgcaagtcacagcacagtgcctggcacagagcagatgcccaacttgtatttgttgacttaaataaaacttctccaaagatgacaagctactgtttgtaacttcagtattctcttgtgcgaagtcctctacatagctctccattcagggacatttctagagctcaaatcatcatgacttccaggaagaaaagttgtagtcactggattagggggcattgtttgaggaaataagcaaattccacaggtggraagaattgtgaattgtgtgtgtgtgtgtgttttgaggtgaaagaggtttagggaaaatttgaaaagctattggaatggaaattaaaccatccagagtgttttattttagarggatagggtttaagatagactcagcagtggtggcattggccacagggctgcacctaccctgggatgcagaaactggcccatccaagtcagctccatgggaaagaatgaccacaaagtgatcaggggtcaccagtgagaaaaactggcatttgctgtattttgtcacacaggacagtagaactgttctcacagtaggagcagggatggggtggaggtggtggtggtgattttagtaaaccagttttctggtgatgggggggcatatttctgtttttaccccttaayaatgagacagcaacccaaataacagatccctcagtacactgaaatgccaaggctaaatgaactggtggaactttgtggctttggctcttggcccacaggcatatccgtgcattagagccatggcttggcagtagacaaagcagctgtgtgggtcctcggggagctctctggctctgtggctttctttgatatgcaactgaactttggcaaatttttcctctcatggcactgtttatgaggtccagagaccttcattatggaacccaatgccaacagcaaactagaactacaggatgtcttcccacattcacactctgcttgcaggctgaagagttagcccacaaggctttcaacaaagggacaatttaggggaagagactgcagaattctcttctcagcttcacatggctgtaaacccataggattggccagacctcttaaactttctttccttcagaaggaaaagatctcttacttaaaaatgattctgtataagattactaatttactgatttccaattcaatagtatttaaaaacaacaacgacagtaacaataatagctagcattcatcaagtacttgaccatttgctaagtactaaagtgctgtgcatgtattaataaaaatgcatttattatcaacatctttgtaaggtaagtactattatccccattttatacatgaagaaactcaatcccaaagagattaattgttagttgttattggtcttaataattattcaccaatttaaggtataatcctgcagatatagcttataattgactggctttcctgaaccccaccttcctcagtctatgacactgggccacagatactaaaataattaaaattatcattcttaattgttaacccacctcaaactgtaactgggtcttgatgagtttcaagtagtatcatccttatattgggaaatctataattaagacttttctaaagtcatgagcaggtatacagaaagtgattgacttggtgaatgagagggatcaactatcctccagagcttgtacagtagagtggaaacaaatgtggtgttggactgagaacggtttaaggtattggaggcaatgattctgttcaagtgccaagattaaaccaatagactctagagggkctcaaaagtgaggctacatgtcatggtttgacgtctaaattatagctatgcaactttctttcctacccatttctactgtatcctctgtgctttctataatagccgctccagggaatgctgataataacattatcggctgccatttttatgccaggcacatgataagagctatacaaacatcatctttataatatgctgtgaggtgggtttttacaataacactgtgaagtgggtattactaccctgaatttacagatggaagaaatgggctatggagattatgaagtgctctgaagttaaaacaactagtaaatggtagaaaagagactctgaagtgacttgtagctactagtttgtcttgcctcataaacaatgtgatagacatctggtatttctgcttgcccttgatctcttaccccttctctcatacctacactatgattttcctgtaaggaaacatgcctcttcaatttttttcagcctatgttgtctagttagrgctgagggctgattgtacccactgggttcatgtctgaccaatggaaggatcacatttcctttctacagagattggtttgcaatagttggttaacccaagctaagttgaatagagtaagcccagaattttgctgaacaataagagttgctaaattggtaggatataagcctggagctccttgtggctgtctttgccaccatatgaaggaactcacctcagaatgacaataaatcaacgtagagaaaaacaagagattgagagaatgttccaggtggaaggaggaattgaataattgaattaatataagattatgaggccatcatctgaggccctggatccaactgtgcctcaggtcagttactcctgacattccagttaagtgagccaataaattcccttttttgtttggtctcaatcacatctctgttacttgcaacagaaagaatactaaataatacacatattaagctgggtgcggtggctcatgcctgtaatcccagcactttaggaggccgaggcgggcggatcacctgcagtcaggagttcgagaccagcctgaccaacgtggtctactaaacccatctctactaaaaatacaaaattagccgggcgtggtggcacatgcctgtaattccagctactcgggaggctgaggcaggagaatcacttgacccaggaggcagaggttgtggtgagccaggattgtgctactgcactccagcctgggcaacaagagtgaaastccatctcaataaaaataataataataatacacatattagrtcctcatagttacatacaaatgtgggccagaaaattctaataatgagaacctgtattgttaagttaaagagtttattcccccattaagtagagataatttctgattacttaggtctactttcctggttcctatattattccattccttttcttttcctcttccatcttatgcatttgctgttcttcttcctagtttccttttggcctttttattattcacctccaccacagtagagagaaaaaaaaaagcatgaaacttacaataaacagcttttctggcttataaggctctttgaaaagtttcagatgaagagtaagttaaaaaatattaactaaaaagcattaaacttacaataaacagcttttctggcttataaggctctttgaaaagtttcagatgaagagtaagttaaaaaatattaacttaaaagcaattacgaaatcatttttgggttttagttagccattctatccatgacctttttttttttaaaccacatattaagcttgatgaaagtccttgatgtcattgcttccacgacaaaaatacaaccttttctgggttagtttcccttaatcattaatgatgagctgtaaaatattctttccagttcaaaagtggcatcaaataagtaactaagatgaaattagtaataattttggaaatgtggtcatttagcaagctgatatttactgaacatctactgtgtactaggttaggctctggaaaaagcaaagatgaataaaacataattttcaaaatctagctggatcggcaagtctgaattgggagtgagcaggaggggcagaggtgagggctgagcctggagcagccagttggcccatactgaggaggaccttccaaaggctttggaragtagatactatagggagctgaggatggtcttcaagaagtgaaaaatgtgctaatccactggggagagcttacgggttatatacaagggtgttatttgtctgacagagaaaactcactttaagattacatgaatatatgatccatatagtctaccaggacatctcttttatatattgaccagaataatctgagaaagctggaagtacaggcatttaagccactaaagctgtggactacagttcaccctaagcaaggaagcgagtgttttttaacatgtcatctcctggattcccgaggctttctgggttagctcaaacctgggccatttagcttcttatgggcagggacctcatcatgttcatctttgctttccctaatgtctaagccagtacttggaacataggaggtactcagtaaatatttgttgaattaatataacattaaatacatcattcagttctgagtagtcattgtttatacttgctgtaaatatggttttatgtaatttccaagtgtgtctgccctttttaggtcctgtattttcattttggcatagtctgctttcagtgrcacccagctagaatttgcctgctaaacagaaaatctctggtgacaccgaattgcatatcctggcttgattgctgatggagaatggcagagcacacactcttatctttagcttgactytccatgtataagagaggggatgtttttgtttgtttattctgaaatggaaaacaaaaaagtaatgcatgctagttgtgaaaaaaaaatcaagcaatatagtaggagggaaaatcctctaatggtatataatcttctaggctttttctatgcatatatcaaaatatttatgtactcaccatatataatgttatataaactactttaaaattaatccacacattatggataatttttcatgtaaatatacatattactaaccgtttttcatagcagcatagtattcatggtatggatatacaggaatgcagttaagaggataacataaaaatgaacgaaatgttgtgttccttaaaaactcatatcaggaaaatctaaagtattttcatttctaattatttttaaaaaacaacaaaactttgtttcaaaccaaagaggtagcaatatagcttcatttcagaaattgctaactccgtgcatgaatattgtagccgtgctttgcttcatcattaaccttctctaattcttctacctagggaccccaaagagcatggtaaacattttacaaagtctccttaaagatgctggtctggactgaatggatctttaaatctaactgtttttaaatgtcttttagtaaggcccaccttaattgagcttttttcttaagatcctgattttaaaggggtggatggctcagaaaactgctccagatcaccaaataaaaaatcaagttctgaacagtgagacacctttaggcccatccccccagctgtccccaagatcacactccttcatcatgtgtctcctgagagtcagagatcctgcagctgtgcctgaggaggactgaggtctccaggctcttgtattgctaaacctagtttttgtttttgttttgtttccattctcttttttcttgcctttttttcctctgtggtgtctcatttctcctagagtcccggctgactcccctggggatgaatctgcctgcctgtgcatacaggaatccacagtgtcattagggtagttatctctaatttattcttcctccttgtgattagaagaactcggtctgaatattgaagaaaactcatgtgggctcttgtctttgtgataaaagcttctgtcccatagtaattaggcagagctctagtttacttctaaaacatgattaactccttggaaaggaggggaaaaaacggaaagttatttaagatgggtaccctaggggaacaaaggagaggcttttcccattgttatgcctcctaattaggccaagcccaaggttgctgtgtgtcattccaggaggcagtggcctgcctggtaggcggataggagcagaggggtgacagaatgaagctgacatcagaaaggcccaaaaagagcttagggcttttttttttttttttttttttttttaagatggagtttcactcttgttacccagactggagtgcaatggcacgatctctgctcactgcaacgtccacctcccgggttcaaacatttcttctgcctcagcgtctcgagtagctgggaatacccaagtgcaccaccacacccagctaatttttgtatttttagtagagacggggtttcgccctgttgaccaggctggtctcgaactcctgacctcaggtgatccacccgccttggccgcccgaagtgctgggattataggcgtgaaccaccacgcctggccaggactttttaaaagactatatcttctgaacttgcctcctgttccacctctgaagggccctcggggagagacggagcttagataccacactctgttctgtagttcctcacatagtttttctcactcagaaccactgaaagaggttaggttgctttattcctcatgactctctgttttgcttgacttgtttatggtgaacatgtggtatttacataatcagaaaaacataaagccatattcatagtgtaccaaccgggaaagagagagaaaaattaattgtttgttgggactggcaaatagtctcacagtgtagtcaagtcaacattaacagtaagaagggtatatgggattatgaaactgtaaaaggcccctgaggattctgagcagagttcattcttagcatgactgtgggggctcagtgccaggccatgctgcaccccacagagggccctgtccagacttctcagcacagggaatgcctcatattggacagtttttgactcctgtgatggtcagtattctcagcttcagggccctctgtttcaggcaagataacctattcactcattctatagaatgctcagcctgatggtatgtgtgttaagtaggtagactgcctggaaacacagattgagcaccaacaaatgattctaatgagaattttagaattttaaactccttatatatccagtctggttgctatcaagctcttcctaccaagttctttctgagatccttctggtgcctatacctgtttcttgaattatttcagtctgtgagcttatttctatgaattaaagataccttaattcccttataatagttgataagtgagtcattctatggttatatatagtgtaagatttagaaacattcacattaaaaatattgaaaatacaaaagacgaagctgacaggttcctggttataccctgacagcactggggagagttattgtataaagttctagctctcctccatcttactgaaactaatttcgtttgtgcttaaaggaaaagacaggaagggtgccctgttgtctctctgttacactcttcaactcatctgaaatcctgtcttgtgttttcttcttgtcctttgcccttgcatttgctggaggaggactttagggaaatagtaagaatgctgcggtaacagagagaattaatttgaccgtgctctgaagaaagagcatgttgatttctcactagaattggttcctccacccatcagagcagggccagggatgtggtacattacacaaaccagtcccatttgaccagctgtttttggatgtgtcaagcccagatttcagcccctttacatagaaacatgttgccttccttgaatgggttcctgtgagactaaagaaagtcccgtgtggtccaagcatgatgtaacagggatgtgtgcttcagaattcaagacacaccctctgagttcctggcatctttttactatagtaatcacacagccatagtcttccttctgtgacccttgaaggccagagctgccttgcctctgctgcattttctaatgggcctggacaggaggacccagctctgtttcttatgggtcttgtggatggcgctgggaaatcaggcttgcctaactggatatrcagagcttagcattaacagctggacagagctcttgtgcatcttgttttttttggttatttaaatactcctgatttagggtggagaaagggaatggatttctgttgcttgaaattccttgcgacagtatttgtttgctttaattggcgctagattgaagttwccaaattcagatgatgatgaaaccagttcacacttatttgaaaattgaaattggtgatacttatgttaacttttgattttttaaaaaaacaataaaaaataaaatttaaatgtagtatttgatggcratgagcttactgacaataaagtcaattctcacttccttcagcatacccaatggtaatattaaacaaatggtaacattaacaattttagaaatggttagaaatatgtacagttctgtagcatgtgtgtgaagttgtacattagccttgcacacataggcactctcacatggacagcaaggaaaggcagaccattgaactaactctttagcctttaaaatggggcaagttactaacttttctgcaatttttatccccataagattctctcatcatagtggaaagaaactaatatttctcaggttcctatgacgtaccgcatttttcactaatttctttcatctctttaatcctcacaataagcctatgagatgagtgctattgtgttcattttagagatgaggaaagtaagtcttgaagaggttagagtacccaaaatcatatagccaagatttgaagccatgcttgaccagatctaaggtgtgttacattttgtaataatgatgattgtacttgaccccaagcctcctttttttagccccctataaccatgacttgataatagctaaaaaattgtattgagtagccttaagaggagctatttggtacatattcacatgtgggatgtgtgtgtgtgtgcacatgtgtgtgtatgtgcataaccctcaaactgatattaagataatgttactaaatcactacctaattggagatagaaaaactaaagttcacaaagagtgcctgcactttaatgtggaggtttgaccacatatgtatattctttctcatgattcatttgaaattatgtctgtatgataaactaataaagttaatccaaaaagacaaagagagcatgaatctttttgagatatcaacaggcttcagcaaataatagaacacatgaagtgatacaagattggcaagaaagaacagagacacttttgtgccctcaaartagtgtagcagtagaacacttgagagatttcttcaggacttagaagaaccagatatcatagaagacagaagagacaaaaacagcagattggtttaaaattgtatatgaaatatatgaagtagctgaaccccctttttcaccctggaaagctaagtgacaagtctccaacccaggataaaagccataatttatctttggagaaagacttgggactctagacaaagcataggacaaaaatgggcattttattaaaacaggggattatgcctgccagatggtgagtctacagcccctttctctgccctgcttctagaatgtagcaaccaaacaagagatttttataaatatcaatccacctctgagaaggtatctccagttattgactctacagtggatcccaccgtttacaaatgctgtgtatatacatggtgcttttaactgtatttttagtaaaaaaatattttatgttttaaatatgattgaaaaccaaggatcaccagactttggaaaatgcctctcatagcaaggagagaagaaaatagagataatgtgagactcaaaagaaaacttaaagtataattaatttcctcagagagttaaagatgacataagaacaagaataggaagcactgaattagaagtggtcagaagacaaggaagagcacctggaaattaataatataataggtgacagattcaattaaagagctagaagataatacaaaagtgaaatcatttgctgttttcarttttatgtgtaaacattaagttgattaaaagatcagttgtctagtgctgtgaaaacttttaaaacagaaaaaggaggagtcaaaattgaatagggggagataaccaagatagatactsaatcaggatgtttacattttggcttaggagactcaattttcagcatagtggaataaggcactcccaaactctacacctccataaaagtaacaagaacattgacaaaaacttaaaaaaaacttcttcagaattctggaaattaaataaaggctcacaacagtctgaggagtgtttatttgagaaaaaaacaagtgactctcaggaagaacagcaagacttgtggaattttaacttgccctaattccattctcctttcatcagtgctacagtaaccttgcacaccaacaatctttatttgtggcatctttgaaagccagcatggtagcagccactggagaggatagaacaggtttggagcaccttaaaaaccccatcccagagaattgctattatttgacctgtccaacagcatgctaaaaagctccattctcagggcttgtctttatttgacttagattcagaacttggcctgtgtgaacagcactatccacagagcatttgtcaaaaacagccagtggtaattgctcaccatcatggctgcccaaggctccattaccaggtagtgccaacaagaggctgaccaaaaaatacaaaaggaaaatctgggggaatgagatagctacagtgggttttataaagctcctacatacaccaggaatctagagggccacatagatatccagggctttgtaagagctgagaaaacctgaagatctcacttccagctgaccttgaggctgtgtgcaagaaggaagtgaagaatgaaacagagttatatggcttgatggagtattgaatgcatgccccaacatmcacacacacaggctgaaagatttactgattcacagcatttaaggaaatctgtcatgtcattagtggaccacraagtggcttcatgtataagggaccttcaataaaattaactgactgacttctcatcagaaaccacagaagccagaaggtaattgaataacatattcaaactgttgaaacaaaaagattgtcaatccagaattctatatccagcaatattatccttcaaaactgaaggagaaatyaagacatttccagagaaaacaaaatrtaagagaaacacctgccatacagaaaatactacaaagaattcttcaggctgaaatgaaaggacactagagagtaactcaaatcagtatgaaaaagtaaagtgtgtagccaggtgtggtggctcacacctgtaatcccagcactttgggaggtcaagacaggtagatcacgaggtaaggagatcaagaccatcctggctaacatggtgagaccccatctctactaaaaatacaaaaaaaaattagccagacgtggtggcgggcgcctgtagtcccagctactcgggaggctgaggcaggagaatggcatgaacccaggaggcggaggttgcagtgagccgagattgcgccactgcactccagcctgggtgacagagcgagacgctgtctcaaaaaattaaaaaaaaaaattttttttaaaaagtgtgttggtaaagataaatatgtaggtaaatgcaaaagacaatagaatgtattttcattkgtaagtcttttcctctcccatctgatttgaaagataactgcaaaaagcaagaattataaaactgtgtagatgggcttataatgtataaagatgtaatttgtatgacaatagtacaaggaaggggaagagaatagagctatattgatgcacattttttgcaaacaattgaaattaaggtggtatcaatctgaactagttttaagttaaaatgttaatggcaatcctcagggcagcctctaagaaaataactcaaaaatgcatagtggaagaaacaacaagagagttaaaattgtacactagaaaaatacctaacacaaagaatgcagtaatgacagaagatagtaatggcaaaacagaggaacaaaaaggaaatacacacagaaaacaaatagcaaaatggcaggcatatatcctactttatcaataattacattaaacgtgagttgattaatgctccaaccaaaaggcagagattgacagaagaattttttttaaaaacaacatgatccaactatatatgctgtctacaggagacacactttgagtcagacacaaataggttgaaagtaaaaagatggaaaaatacatgtcatgcaaacagtaaagaaagctggaatggctatgctactatcagacagattagactgtaagacaaaaatcattactggaaacaaaaaaagagacattttataattataaaaggattgctccatcaggaagacataactataaatgtatgtgcacctaacacctatgccccaagatacatgaagcaaaaactaatagaattgaagggagaaatagaaattcaatgataatagctggaggcttcaataccccactttcaataatggataggacaactggacagaagttcagcaaagaaatagaagactcaaacaatactctatgccaactagacctcaaaggcatctatagaacactctaaacaacagcagatacatgttcttctcaagtataaattagactacaagttgagcctcaataaatttaaaagattgaaatcatacaaacttctccaatcacaatggaatgatttttttttttttttttttttttttttttttttgctttttttgagacagagtctcactctgtcacccaggctggagtgcagtagcacgatcttggctcactgcaacctctgcctcccaggttcaagcaattcttgtgcctcagccacctgagtagctgggattacaggcatgcaccaccacacccaactaatttttgtatgtttagtagagacagggttttgccatgttggtcagggtggtcttgaactcctggcctcaagtgatctgctcacctcggcctcccaaagtgctggtattataggtgtgagccaacacgcccagccctgggatgaaatcgataatcagtaacaaaaggaaaatttggaaattctcagttctgtgcaaatttaaaaacacacacagacacacccctaaataagcaatagttcaaagaataaatcacaagagaaattagaaatgagtgaaaatgaaaacaaaaatacaacatatcaaagcttatgtggtgtagttaaagcagtagttatagggaaatatacagtttaaatgcttatgttaaaaaattattgcatgtatattatacctaaataaagctgatattaatgtagaaagaattggtggcccatatttttgactgtataaatttgcatactaccatatatttgtagttgataagttttctctgattgtggtataattcaggaagaattactaatactttctttttttttgagacggagtctagctttgttgccaggctggagtgcagtgacacaatctcagctcactgcaacctccacctcctgggttcaagcgattctcctgcctcagcctcccgagtagctgggattacaggcacgtgccaccacgcccagctaatttttgtatttttttttttttttttttttagtagagacagggtttcactatgttacccaggatggtctcaatctcctgacctcgtgatacgcccacctcagcctcccaaagtgctgggattacaggcgtgagccactgcgcccagccctaggaattattaacactttcaaaccacatgtaaagttcactgaaaaaaaaaaaaaaaccaacatggtttttaaattgtgttaataaatattaagcttgtagttaactatatgcatgctaaagtagttagagaaaagtgtactgatgtttgcaatttactttgaaatgtaataacaaccagaacaaaaaataagatgggttgatagataaatagatatgtgctaaaaaacaagtgtaataaaattattttggtctttttgtttccgttttttgagrcagggccttggtcygtcacccaggctggagagctaatcatagctcattacaacctcaaattcctgggttcaagtaataaaatgttaatggcagaaccagttgatatgtttatgggtattcactataaaattctttcacttttgttttatgtttgaaaaggttcataataaaatgttgaggaaaaaacmgtaaactcaaaatgtcattctgaccctgaactatttactattccataatttactaagttaacatcctactgatcagaaaaaattaatattttctttaaggagccctagctcttttctaggcaatactttcttatactttgggaacttgatgtgttatattataggtaaacattttgaaaacaatcaccagagaggtgttatacaagagcataatgatattctatgaggaaataggatcttataacctcagggtcaaaattcctaagagactcttcccagagactacaattatattatttatatatcatattattatattgtatattattatttatattatattttttagggattcagatcagcttactttatgtcccctaatttctgtagaaaaacttgggaagtaggccacatgtagacaaattaataaattcatgcctgctcaaatacagttcatttttccatcctgccattttccagcactgtattacttctacagatcttgctcttctattatgagaaggcagtttagatgccgctaaactcattctctgctctgcccgcataatcctgcaaagctgctggtgttgaggcttcagtgttccatgcagagtgattttccaagtgatgaagcagattctaatcagtctaagatccaactacagactgggagttggacctctgccacctttccctccagctctcgcaacacaatggggaattcctgtgaggatcactgggtacacttcaagctcccctgatcctatggcctcattccagtcacagatcttcctgtctggagcatttccggcccttctgtcctttggcttggagagttcagctcaacctgggaagggacagaagactttggggttatcaaaagcctgttgaattatctgatgcaagactaactggtttgtttgcctccctggctctcttcctgagcttcaaagcagctgagaaaacaacttttttctaagtcttggacaaggaggaaaaccctggcatgaaggatttctgtcgcagacacttggcatagctagaggaaaggtttgtttaacttaccaatgggttttattagcctaggactccagttgaagtgagataatagggtccctgtagaaggacatttcagtcagtgggcttcctccctaatttctcgacaggacccttgcatgcagatgaaaagcatcagacacattcaacaaggaaatccccactgaatttatcaacgaccacgtaatcttgctgatcatgagggagactgagacaggattaaaaaactagcaggacaggaaattgtgtatggatgcaaagtcatattggggagctatctacttcaattgcttcttgctgaacttctctttgctgaacrtattacattgtctctgggccccacatcttatagcagatagcagggatagaaagaaagccagtcctaccacctgtccttacaggaagaaactcttctgcttatacttttcctctgccaggtcatttcactcttcctttcacctcccaaccaatgtgagatttggggttggggtgggaaggggaaggaaatagaagagaggaagaattcatgactggtgtacaggaagccttcctggcacaggaattagagaagagaaagtagaagaatcagtgccagcttaccctcagcctcatggccgcctattcatgtctgctttcctgggccacataggcaaaactcactttttcctaaggttggggctgtattgcaggaactcatgtaaactgccaggaccagaagtctataaaagmagcctccaggccgggcacagtggctcacacctataatcccagcactttgggaggctgaagcaggtggatcacctgaggtcaggagttcgagaccagcctggccaacatggtgaaatctggtctctactaaaaatacaaaaaattagctgggtgtggtggcaggtgcctgtaatcccagctactcgggaggctgaggcaggagaatcacctgaacctgtgaggcggaggttgcagtgagccaagatcacaccactgcactccaacctgagcaacaagagcaagactccatctcaaaaaaacaaacaaacaaaagcagcctccagggtagcctgtgcccaaggttcctgacatctctgtgctgcctgctccacactggccttcctagccacccatggagaaggactgggctgggttgcctcagatgagggccacacctatactttaaaaaggaggacccagacactatccctagaaggtgtcgccatcctggagaaggcctggggtgactatgcccagcactttctgttctgtggctccttttccactttctgagcctcttggaagtgggatcaggccaggaaaaacatgtgatgctatagcaagctgaaaccaaagacttgactttgggcctggccaagccragaatcttggcagtgattgactrggaagcctgctgttttctatggcattttctgagtcccctaactctgggaagagggaaccagataagtcctaaaaatggatatgaatcagtagagcttctgtgggtcatcaatttgtgcatttattcactcattcattcttgtatttcataatgaagcttctcttacgtatatagcaccacactagaggtttgtgggaccagaaggagcagcaacaacaagaatgggtcaaatagattatgttaaattgaggtaacattaaccataaaacagtaaagaaaactaataattagagagtacagataaagtatgaagagattagagagagatgactttaggctggagaaatcggctgaagcttctggaagaggtgacatttgtatttagactttcagggatgaaggrcagaatgaagactgccagtgtggaagcttgcgaacagctgaggcagccygcacggataccctgtccagctcccttctttgtcttgaatcatgcaatatccatgcagggaaaaaaaaaaaaaaaaagcccttatttgctgttatgtatcctgcctcatttaatgtattatcccagaaaagtagattgagttgtatgtggcagattgggagctgccatcatggtggttaaaagtacagaccaggtagtacagaaccaggtagcctgggttggaacccagcttcagtacttataagctacctacctttgaggattattgtgaagattaacgtccattggttgttgttgttctcatcagcattattactgtaggaaccctggaagtctcccctacccacccaagtcctattgcactttctatcatgacagaccatttctcttttttgagagtcttatattacaatgcagacacacctgagagggctaatgcgtgaaggtttaccagccctcactttagggktagagataattagctgacagcttatttactaagagcaaaatagaaacctggggagagggacataaaagaaggaggagagagtttacaaggagaagcccatgggccccaatggccaattttccttccacgctttatttagagtacataggcctctgtgtttctacttgtcattggagagaaacctccacacaccagcatagggatgaagtgaagaacagtgaggaagatgcctgcccatcattctaggagccctcagctgaaaagcaccgtattgggccctagagaagggaacagagtgagattacagaaaatgccccagatctgctgagtcccactgaaaattcagagcttgcctctaaaaaataaactgaggtagaaacaggtagcagtattttaataagtgcacatttacagagtgtaaattgaatctgcctggcccagagtgtggtactcaataaatgtttgttgatggatggattgaatgccctagagtgaggagcacgtagtggaatgtcacagtggaaaaagcccaaaggcttccctgtattgtctgtcttctgccaccagaatgtcagctctatgagatcaaggacctctctgtcttattccctgctctatcccctgcacctacaacagtgccaagcacaaagaaaagagcccagtaaatatttgtggattgaataagtgcatggatgggtgggtggatggcacaaataacgaaaattgcttccagatggtagtgggattggggatccagcatcgagtacatattggatataccttaaatgttcctccaaagaattgatggatagttggatcaattaatcaaaacagagtctcacgatgttgcccaggctggtctcaaactcctggcctccagcagtcctcctgcctcaacctcccaaagtgctgagattacaggcccgacacctccaaagaattttaaaatatgggtgaccactttccttgcaaggataggtaaagagaggagaaagtgtatttgttagagtgcagttaaagccaagctggtctgatatgaaggaaatattcaagaagaaacaatttggctatttgtgggagatgggattaactgcccacataccacatacctaccacaaggagccccaggctttctgagccacatatatctacactcattcttgctcagttacatatttctttgaaccctcagacttccaaagccaactttcacacattgcacacaggtttgagtgcgatcagaatttttcactagggccctgttgttttattaagtacctaggcctccctgcagggcaccatgtattgaagaagatagaatgatacttgaaaaccacctaagtcagacaatgattagaactccccagatttatgggatggatgaacatctgaaccagcacagcctaaattacctgctggggggttgtctgctttrgaagaggatagtttatagtttgaatggcagaagggtcatggggcattaattcagatcaaaaaaagggaggaatctatatgtatccacaaagatacatggcaagcrtcactttttttcctgaaatatattgggctagaaagctaatttacacttcccctcactagtatataatactatagaatcttcaggttagaaaactcaaaagcaatatgcatcttcatatagtatatactactagcatataatattacagaatcttcaggttagaaaactcatagtgaaagcaatatacatcttaatatagtatatgctagtatataatattacagaatcttcaggttagaaaactcatagtgaaagcaatatgcatcttcacataatatgtactagtgtataatactagcatatgacagaatcttcaggttagaaaactcatagtaaaagcaatatgcatcttcacatagtatatactagtatataatattatagaatcttcaggttagaaaacccatagaaaagcaatatgaattttcactccagtcctcttaccatgatgtttgcattgaagtgtttgtggtcattgattgctttgggcctctaaccacctwcttgtttgtcattttttcttttggaatttgggccccagtccaaacacattgcatcaggcatggtttcctgggtgaggaggagagcaggactatcacctcccttgttccacatactatatctccattgatataacctgagaacttgctagatttttgaraattacatctcacagctgactaatattgaactatagttaaccaacattccattttctgaatgctgaatctcattctggctgttccataatgaatcattggtgctctgttctcaaggacaaggcatttcatttagttcaataaaattgcatcccaaacaatgtgtaggatttgttccaacattctaaccaarttgagatttgttttratatcatgtttatctgatctaatatatgacctctttctctaaattttttgtcttctgttaccttcccatcaattcagcatctcatcattgggtttagttacatgattcacaagtccaaatgtcacctcttcagtgagatctcatgatactctattcaaaattgatgcccccacctccaatccagtacacttcctgtattctttatctgctcttttcatccattgcacatatactcattgaacataacatattttatttattttgtacttcttatctttctttagaatgtaagctctattagaggagcagtttttgtcagttctgttccctgctagatttcatatttgttgtatgggtgtaattgaatacatcagcaatcttattcaagtcagtaagaccaagctagaattctgtacattctactagaggttgctgcccctcaccaggttactactgaccttttggtcactcacaagtccacttaatggtattagcacccagctcaactkatcttcactttatccagaaggctatcaagagagtttgtcacattttttgctgaaatcagatattttttattggtgctagccctctgatctatcactctggaagttcttttccaaagaaaggaaatggaattcatctgacataacttatcacttccttttttctgactgcacacagatcatccttttgatgactcattataaatcctgctccagaaggacagtgcattaatcagtgacctgtccgaactctttgatttccggcagagaggtccctccaggtgtgagatccttttggctggggttcagggcttgctcatagactggctattagaaggtggagttagcaccacagagttggaaggcttaggctcagatgccattcttgtgtctcattgaaatattacattctttttttctgggtctcagtttctgcagtgcataaaataaaaagggtaatatttttaaaaatatagcatgatactttatttattgctatttacacccttttggtttcatgtctagttgctacatacagacaacaaagatctgagatttttttatatgtttagtttatttttactgctatttgatctaaaggatttacgtttatcttatccatttccttttttaccactctttctggcacagctatagtttaggcccttatcatctcatcactgaattattggagttgcttcctaactggccccacatctcccatctcttgcttctccatcttagactcttcaatcaggctaattgcctagaacctggctactcaaaatgtagtctatgaaccacagcatcatcgtctcttgggagcctgttagaaatgcagactctctcaggctccactcaaaacctaaagaatcagaatatgtaggtcaacaggacccataggtgatgcaaacccacattaaaatcgagaaccactgttttttcttctaccatgccattccccttctaagggatatccttaaaattcacattgaaccgggccaggcgtggtggctcacacctgtaatcccagcactttgggaggccagggcaggcggatcacgaggtcaggagattgagaccatcctggctaacacagtaaaaccccgtctccactaaaaatataaaaaattagctgggtgtggtggtgggtgcctgtagtcccagctactcaggaggctgaggcaggagaatggtgtgaacccaggaggtggagcttgcagtgagccgagattgcgccactgcactccagcctgggtgacagagctagactctgtctcaaaaaaaaaaaaataaataaataaataaataaataaataaataaataaataaattcacattgaaccatctccgaactgtctcaggcagaaagcaatctaccttaattttcaaatgagatatttttgacatgaaagtgtaaattcccacctatactttcttctcattggttctgagaatgatgaaytagtgtatctaaataactttagaacatttgtaaaaattactgcaactcaactggagactttcttctggtaggagccaagtatattgttatttggtgagtgagggttaagggaaccatatgtgatgggttagttggaaatgttcctattatttattgtgaacttattttgtgtttgacacagtgacaggtattttgtatacttaatttaatcctcataataatgccacttaggaaggtgtttttatcaccattttacaggtggggaaactgagacttaacaagtttaggttgtccagagtcacagttttggttagaattcaggctgcactgtagcatcaaagatgtcaaaatacagtggttgagccaagtggctctgccctgagaggactggtgaccccgagtggragacactgatgctctctgaagccacccagcttccctctctcatgctgccttgtcatccccagagtgttgtccacacccatttgcttggatctggttcctgccttgggaagagcgaaagagaaagtggagggcacgcagttttcttatgaaaacataatccagaatttctacctatcatttgtactcacattctgctagtcaaagcttggtcacatagccacacctacttgcaaaagaagcagagaaatgtggaaacttggggagttatttactaaagggaagaaggggaatggctgctagaggaaaattgtaggctctgccataggctcctagccaatcagtggaagagctagattccaagcctatgactaaaacctgtgatcttttcatcacattttcccaccacttctcatagttgacagcaaatatttgttgaattaagataggccaagatattatatataagccttttgatcatttgaaattgtttcttccttctctcttgcctccctgattacctacacggttcagtgttcaaactgtctttgtttctgataatgttttaatgtgtaaaacaggaaactgataattaatcttcttcagtagaaatactataataaaataatctactaattattagaggttctgtagaaccatatgagatgtgataatggcttaatgatactgatttttttaaatgatcaaataaccatctcctttaaaataagtgttgtcttaggaaaatgccattgctgaaaacattttttgatattttggctggtatatcagttaactcttgctgcacgcactaatgcttcatgactccactaccaaaatctcagaggcacacagtgatatttaacttgtgtatctgtgggtctctaggggtcaactctttagcctgagccttcctggccaactctgtttcaggtatctattgcccttcttctgagatagcagactagcatggacatatttttctctgacaatggcacaaacgttaagagaacaactagaaatacttgaggctttttgaggcctcggctgggaactggcacaacctatgtcatgccacctggcaagtcatatgcccaaacccacaatcaagggccatgggaaatgctctacaccttaagtaatagaaaatgtagtcacgtagtagagggtttggtgaaggaccagggccaacaaagaaaccttcaattgctttgcctttcgcaagttattttgaatatttgcagtgatagtaaatcttttaaaggtagctttgaatttttttagtaaaacagctaagtttataaataaaattagagaatcaagctaggtttatttttgggcagaaaggtagctatttaagcmtgtgttataaaataatgagacttatttctagaagaattgattcaagaatatggcatttgatgacagaatagttggaataagcrtacagccttttaaggtgaccactttgaaaggataacactcatttaaacattgggttataaaatggtttttttttttttaaataagccttgtgacttacagtcctatgttaccactttgtctcaaagtgggaaggggagtgaatagaggcccatccctgatcctttgactwaccctagaaaaatgtgctttatgtgcagattcttattgccaagtcccctctggctcccttcacctcatttgtctacaccatcaaggaggaaggcctggttcttcaaggtaagatccttggattaagccatttctttaagcttatgctcagtgctgcccattgctagtggtaattagtgctatggttctgatagaagctagctccagacagaatcaaaaaccaagatgcattggccagtgatatttaccctartgagagcaagagagcggcagttgtggcaagaatttgacagagaagattgaggtagggccgaaggagacctacagaatttcctaacagaatgagacaatcaaaacatgaggatcaaaccaagaaagctcggaattgctaccaccccattcctctttgcagatcctatggcatgaagtgggcaatgattctgacaccagtgtggaggtgaggagccagtgctgccccagagccttcttgcttaacaagctaaagaaccatctgggttggcagcctctggggcacaatrtcatggctccatgagccctacttccctgactccttctggttatcttgtttccttttcctgtcctgtcctgacatggtcttcctgctggggaccagacctttaggacctgcaccttgtgacgtgagcccaggacttagaaggagctgagttcttgcttagggtatagcaccctgaggccacatcctggaactcactgatctacaatggtgattcattctcagatgctagatacgccagtggttaggaaaggcacccgattacaggtctttccagaaagcaattaacatgaaggggtaaattccagcactgttagaagagtcagcccacaatgtcagatgtacaaaactgctttgtggatgasgaaggatctgcacagaagtgctcaggatayacatctgtcctctgctgtggggcaggagaccccaaccacagagatgcttaggtgaatatctggcctgaccctagaggagcatattgtcactgctgtccatgggagaagtcctgccctgaaggatttataagttaaatatttttcccaggtttatgaaacagggcagtccctgtaatttccccatggagacacaatgcagtgcaaagacctagcagggaatatgcagggcaggctggagagttcatgcttctaactaaggaacaggctgcagccttccctttccttccccttctaaaatgtctgcttcttaatggactcacaaagcggcatgtttgtttggtgcagctgagctccacagcggggactctcaggtccacgaaatttggggtgagaactacgacctttggctcttagcctttgacttatgctatccaagttccttggtaaatatttttttttacaattgcaaatagtgttttctgacaaaggagcagagattttaacaccagattaagcaaagcaaacagcaggcctctttgttacatactctctacgggtgtataactaataagcaatcagaaagctggacttttatttacccagtacacagggtggcattcagctcttcatttttagaggccttcttaaaagattagaagtatagtaagtagcaaatttcgttgaagatttcaagaaattctatggaagattacaagacaatttcaggaggaaaaaagtttgttctgctcagatgacgtgtgtgaagaggcttgatgtgatacacgcaccctgatcactaggcattttgttaaatagcatttctaagcccggtcaaatctggataacttttgggataacatttgtgagaagaagagtcactgagttgcctctctgatgytcattgctaagatcatgattttaagagggaagagaaagttatttagagaaagtagagcctggaaatacaatgaattggtagagtttaaaaaactgcaaggaatgacttttcgaaaaagttggaaaacaggggagaaagtggatcactaaaggaggctgacctggagctgtgtccaggaaagagaaaaattcaggaaaatgtcttataattcaagaacaacaaccagtaaataaaatgcttggttaggagacctcagaacctcacctggttgctttctaagttgttttctctatcccactcccccaagctacacatccctctctgaggtttcccagaagcagtggaacacctctgcttttaccagcaatgcccttgaaaacaaacctcttggcacactctgccttcttgctgtgtgctcccaaagactttgggaaaacaaaaaatgcaggtccccagaaaatgcaggcccctcatttactagaaagaacctttggattttaccttcagctttggtatgatcttgagaaaatctctgggccttgcttttgtcagctggaaaatgaaaacattaaccttgattcaagactttgaaaactgtcgcaacccattggtgggtcatgaagtgaaattgatgaatcacaaccagcatttgaaaacagagagagagagaagacagaagaaagagtgaagaaaaaatatcagattatatcacacatattgtttcatttcataaaatatttcttgtgtgattgtgtgtttgtgaatgtccacatacattatgagtttgtgtgggggctgcagcataaaacgtttttcttacgtggattgttgtaaccatcctgcgggatctctaacagccttgtcacatcagctttgtccgatcctcctaggagaggatgtactcatcattcccttagctcagcccagttgtacccttgagatctccacatactgcaacatcaaagctaatttttcccccttcttaccacatgaccaaactaaaagacacctgcatgattccccaggtttaaagcaaagaaacccttggtccctgggtggaaaacttggaaaggtaccatcagtcaaggccaagtagcttttcttacatgaggagctgcactggcaggtgagccccgagttggtgtggaggttggcacctggagctctgggtgggatgtgcagcccatgtccagggacttagagacagacagggcagctcctgtgctgccaactagaagggaggccgccagccactgtggccgacattcggtcttcaatagagccacctggatggtggaaacaagccaaccacaccagctacccgtgggggtagggaatgatccctcagtgccttttatcccttggcaagccccaagatgcctactggcctgctagcccrgagattttataatacctgaagaactcctgagtgctcaagcagagggagggaataaaaggtgagggcagaattcgatttaccagctccacaggccatttccctcaccggttctcaaggattaggatgctgagaacagtcagcaactgggggacttctacccttccctcccctttgttcactgggatgggaaggacaataaagcggcaggctggagagactgaggggctggttagagatttctcaggctgctttttgaaacwcttgaaggagccggtccrtgctattgttgtagtaaaatagaaagcggaactattctccttttgcaaaaaaaaaaaaaaaggaagaaaaaaagtaaatgaaagaacccccctcctcccagcatcttcaggaggcctcaactcaggccattaacatggtaataccatcctgtttgcatctcctttgtctgtccagcgtttgtctgggatcctggcctctggatgctggaaatacttaggccccaaaggagagggagctcacagccaccagtttcctgagggtttggactctgagatcccaggcagagagagagttgagcctctctgtgcaatgaagtgggaaatgttggggtaggaggggatctcatgaatccatttttcctttggtccccagagttcaccatgcaagtctcagtgcccactaagtgaaaaagctcagcagtttggctagcctcttagagtgatgctcaagtgtgctggggcctagtggagaggtaagagcaggagttggttctgggaatcagctttaatggtgtgtgcccacagaagcatctggcagcagaaaggaaagggagtttacagtgagctccaggttgacccacctctcctctggtcatgtcctttgttcccttagcaagccccgaatgttgtgccacccagaacacagctgggactcaaggccaagaataaagattctgtcattgaaagcagctgggctgtgttgctggcgctgcaggaggcctagaggaaaacccaggtcccagctctccgggagccctcctagttttcaggggctcataggcacaaacacctgyggacttggtgaaacagaacctaaggaaggggaggtccaggggaatgaagrgttgatctagcacagcctccccgttactcctttcctcagggatctggggaggatttgtaaaagaaaagccaggttgtttggaacaggacagaagatagtggcttagttcctcagtaagacagaagtgtgttttttatatcatttttgcaaaatcaaagtcaggtatgacaggtttaatttggatcctggggctgtcgtctattagtgtaggtttgaatgagcgggagctggggagaccagggcaccctgagacaggtccggagaaggtgctggagatgaaattagtttcccatatctccaaccacttggcatagggtggcagaagaaaacagaaaacaaagcaacagcgatcttttttagagctggaaagctatgtgcctcatctttcttgctttgcttttgcaatcaagaacagtttgatcaccttttgaaatgtatcaggacaggcattaatctcttctgtttgttcccttgtcacaaacttgcgttaagttttcccaccccatttttttagtcactgagccagctggatgatttattgacaaaaatgtccccccaaataccaccacttgagttcatcagatttcagtttgaatcagtaacctatcaaaatgttttatgctgctggactcaaagtgacccagaagattctcaatttatttccatccaggtacagaggtatctgcatggtaaataccacctccgcacctggcacagcctggcattcttgtaggagcctgggcaaagagccctggaactcaatggagcaaagagagtgaactcctctcccagaggtcatggagaagaaggcaaagcaggcctgtcacattgtccccagcctgccaggtgccactgcagcctcggaaagtttgtctaggccaaggmgctctcctttgctgcttctgcctgcctcttagtgtgggacctcccagggagatgagaaaggagaggaaggactcgtatctgttcagttctcttctcccctgtgcacattcactttacatcccctccctccatgacatcttctcacacaggctctctgctttgtttactttttttttctggcaatcagccttgaagagagattttacaatatttggaaatattttataatatatgaaaaaaaattttaaatacagaacagtacagaaaatcataaaagaaaacaggtgaatctaacaccccaaataaatactaaaattttgtcccatttgtttcagattttttttttatttacaggaatgaaacttgacaaactttaggactcctttgtacctattcctggtccattccctccttatcccacattcctccacaaaagtggaaactctccagagtttggtctacatctttcctctccattcttaaaaacttttctacatatatgtgaatccacacatagtataatgattgattttgagtgcattctgaaatttgcataaatgatttattgtacacgatttcacaacttgcttttgttgcttaacactgtttttgtaatatagccatgtgatacacaggtcacatgatacacaggccacgtgatacacaggtcacattctttcaccttagatatccacatccattcagtgtgtgaatgtaccacatgctacccactcccctacttatggaaattttgattatttgtaacaattttattacctgtgcttcttgatgtttaggtatgagagtttcactaggtatatataaaaaatggaatggctggtcagcgtgtctacacgtttccatttttactatatcttcccaaattgctctccaaagacttttaccaatttatactcgttctggagatagtagaccaatttctctgcagcctcgtataatcgttaagtttgttgtcatctttccataggcagtcttctcatgccttctttagggatgcactgcactctagcctgagtgacagagcaaaaccccatctctctctatcttaaaaaaattcttcatttccctaaagttaactatataatagttcccagaaagtgagcttttaatctcatccatcaccctcattctcacttgaggaaactgagttccagaaaggtaaagtaatgttcactgcctcaaaattgggtttgtagccatttctaagccctcagcctgggctcctaagattttagaaaatccgaagtgggtttgggccctctcatcttccatcagggaagcccctgtgacaacttacctctcaggcttcatgagcctctgttgagatacttcaggcctgtcctgaaatttgaatctggaaattctaagctaaaatggattggtcatactgatacaataatccttcaacgaagtccctgagtgcagttagattataagtttggccaggtgtaactataacctaaactaacagtggtatacatgatagagatgtactgcttcctcctgtagtgccgaggaggaatgcagtccagagctggtttggcagcttagctctacatgtctatcgaagagcccaggccattgactttttgctctgtcacacctaggatgttgccgttaccatggtccagaatggttcagcatcatgccctccatcccagtagcaggatgtgcatgagatagagaatggtggtgggagagaaagcatcccccatcccttaaggacattaaccagaagttatacacattatttctgtttatatgatgttggccagtctgtaaatatatgatcagaaaggctaaaaatatagtcattaatctgggtggccatatacccagctaaatttcgggatttctgttatcatgagaaaagaaaatgaatattcggtgacacagccctttctgaagagcccagttgcagagattaggtgcaatagtacagacgtaagggctgggcttgttgcataatagagttatactcttaaaatgcagcataaatattgtatgtattgaaaagtgccatcaggaccctctttggttccagactctaaagtagaagagaaagggtatcacttcaccaaggatcagcacccaaaaatcttgttctgcccacccaaaacagaatctccttcaggaaggaactttagtatgtgttttgcttttatgcagtatccaggaaagaaacttcaatgagagctactattgcttatagcacaaggcagggcatgaacttgggtccaaagtcatagaccaaacacttttttttttccaaaatgttttttcctgcctccactttttaaaaaaaaatgaaacaaaatatcagttgaaataacattattgagaaaaactttattccaaggcctggactatagttagactggatttacatttctcttttagaacctggaagccacttggctatctttgcagagttaacaatttgcatttgcaaaaatggccaggtaacagtaccaaaatatgttaaatcaattcaggttgttgattttctttgaaagtctcttccaaagaacttcatgttctttctggaatatgatttaagctgcatttcagtgagttcagttcagcaaatatttgttgagcatctattgttcacaaagcatggtgctcaggggtcaagagatataaggctgaaaaaaaaaaaaaaaaggtcccttccttttagtagcccagaatctagttaggagagatgtagttaaataagtttaatcaaaagccaactgtgatacctattaccaaggttcaaacagtggaatatagaaggataaagggaatagacttattccaagtaggatgactgaggtaggttcttgagagtacgtgggacttggactggatttcagcttgtgaatactgacaaaaaccgcattccattgtctcttgacagaagccaatttcttttgctatttgaggatagattcagggacactggggaatgctgattagttccatcactaatgctgattagtagtgaatgttgagtcatgctgactaatgtgttctaaatggattgactcaacaataaaggcaacgttgagagtcaagagttcagatcctgaatttcaccgatgaagtgtaaatcatttcgccacttagtgcttaatttttttgtcaattaaaatgtgctcgtgggtgagaatccagtaagtcatcttgacccatgagggctttacaaacttcaaggataacagacagcttaacagcaactaccaggacaggcttatgcaacctcaggttattcatagctcacacagagtcagaacacccatcacatgctgctcgccagccatgcgaaacttctgtttcctcacacatgccatgagaactgacaaacagtgcactgaactcacaaaacccgacaaatagaggagcttttgaaaaatcttcctatctacctactggggtgtctgtgtctttctacaacaaatgtcgccacagaactaagggcttgcattgcagacacagctctttctctcttttgacatctccccagctagactgcttgagaacctggccttccatgtccagatgtttactgaattctgaagccctcccagagagcccaggttcttttgttgctctccaaatcatttcccacagaggctgaccagtgtcctgaaggagcccttcaatagggaggataaatgaaggcagatgaagacatgaccccctgaggcttgcccacatccactggaacaaagggtgtgaggcacaaccttgtaaggagtgttttggtcagccgcgtccctatgcgaggccaagtctcccccacagggctgctttcaatggctaccatcatagtggaagtattgggcatttgttaaggactgtggtgtgctagatatagcacaaaacatctaaatcatggtcccctgcctttgtgagggcttcctggctacagatggcagctggctttctcaggggaaacttgggggtcatagagraagctgaagaggggtgcttgcttctgtggatgacctcttcccacccagtgcagcgacactccccttttgtctakagctatccttagtcaagccagggctgcgggaccctaacccacacttccgctgtgtttctggatctctggtttgcaaggccagtggctctgtgggcaacacgtatgaaagaggactgctgttggaggaaagttccatttaggttgctggtgggaagttagtgcatttcataacaatttttttttttcaaactttctcttttttttttttttcctttaggccaagagaagccatagggatactgtgacctttgtctagagttgatgggggtgtgatttgtgaaataaaacaggaccgtactgcttggaagaaggaaacggaagctgacataatggggattaattagttgattgctgttgagatggtaacagatttgctcctaaaccattgagctagcgatttcagacctagcagggaaggtgaagatgaagaagcctttgttcaggtctctagatgtgtagggctgagggctttgccrccatgggatgtcaacagccataataataatttgcacttatatagcacctttcaaccaggcacctcaaagcggtttaaccacattaattaattaaagcccacaatcctcctggggagaggaggaggatgactaacaagatttgtaattacaggagggaacatttccgaataaagtattgtctaccagataaaaagagtaggtgtaaaggaattggggtctccaaatagtaaccgattcagaaatgaaatcatggaatgatgtgggaggctgggggcgggcatgggcaagggggtcgactctgtgtcagagggaggtcgatgggctcagaattcactgacaggttcagatccagccgagaagtggagcatgtatggtattagtggcatttgaaggtcattagtggcataactattgtagtgtaaattcaagttttattggtatattgtgtatagccctgcagaacaaagactgagactcatgcagtatttaataaaggatgaaatgatttctttagatttaaagcccaaagctgggccagtcaattagcaaataaatcaattggtgacccgtaggataatttagtcgtttccagtagaacacccagcctacacactcctactgccatgaggctctgattgaagcatcagactgggttcagggcaaggtctgggggctttagccccttcaaagccaggcattaaatctttccagcctttggccttgtgacctatcttacccargttgttagtgacctcmagctgtcctctgtagaatcactttgtacctgctcctccatcagagatttttagtgcattgagggctagaatcaagtctcatcctatttcatgtctcctatgagtgcccaacagagtgctgtgcaccaagtaggtgcagattgatgaagattgatgaagaaagactgagtcctttaacgactcagtatttgttgagcgcataccaagtgctcaggtaaagcttgaaaacaaagctcagtgtgtgcctgccctccaaaaatgtactccaaggaatgggaaaagacttacaaactattaactataatataaagcagaatcacatccaagccccgggcagcaagggcaataggaagagcatcttattcagctggagtgaatcagggaaggtattggtgtgctgtgcatcggaaggcaagaaggatttgggtagacctggaagaggcagagcaggaagatgtcccaggctgtgaccatgtgtctccctctgagtgaggtacattttgagaacttgggatgttcaatagaatgttggtgaaaaccaaggtgagttttcgtatttaatcaggaaatatacatttcctgtggattcttatgacatgaattggttaatttcagacatcaagggactatttgagaagttggaggtagggttcaggatacagtactccaaaatccggcacgttggccttgaaaaaacagcagaggcaggaaggccgttgtcaccttcccctcacccctcctctcctgaagcaggttgtaaaatgttcattcctgaagtgttcactctctacccagaggaaaggaatgtccttatctctgaagacacagggacagagaagaatctgaacaaacaggccttgctaaatttcccccagtttattcccattagatcatactctttagtcctccaatcatacttctgcctgactgtctactcttcatcaaacttaagcataaaaatacacagatttccctggtttgggggtggtctttcttcttattcttctttttttttttttttttttttgccagagtctcactctgtctcccagtctggagtacagcagtgctatcacagctcactgcagcctcaacctcccaggctcaagcaatactccaacctcagcctccgaagtagctgggaccacagatgggcatcaccacacctggctaattttttattttttgtagagacagagtctctactgtgttgcccaggctggtcttgaactcctgggctcaagtgatcytccaggctcaagccaccttcccagctcagcctcctaaagttctgggattacaggcatgagccacckcgcccagccaggtcttcatttctaaaggttctcatgtcacataaaacttacgttaaataaatttttatgcttttctcttgtaaatcttgttgttgttgctgttattgttgtttgagatggagtgttgctctgtcacccaggttggagtgcagtggcatgatcttggcccactgcaacccctgcctcccgggttcaagcaattctcctgcctcagcctcccatgtagccaggattacaggcatgtgccaccatgcccggttaacttttgtacttttttttagtagagatgaagtttcaccatgttggccaggctggtctcgaactcctgtcctcaggagatctgccctcgtcggcctcccaaagtgctgggattacaggtgtgagcccggccttctcttgtaaatctgtcttttgttatgggggccttggccatgaaccttgcaatgcgttcatgcaagatattactttttctcccctacagtttctggtgcccaatatggggtgactgagacaccccactcattctggatcttgcagatgagatcctggggcaactgacaaaaagctggaaaaattagaattcttatcaaagtcagctctcccagatctctgtctgtagtgcttggtcaagagagacrttagaaatttctccttgtcccttccttcccaaattcagattatcaggaaaaaaaaaaaaatgtctatattgtgactctctgactaaatctggctttaaggtactcgtttgttactgatcctttccctcgcagggactgctgtctctttccttgtttttctcaatttctgtcctgataacttggtttgattttctccctgttggggcatgcaagctgtcttgagttccccaaccaacttcaggggagggaactcaagaatacggctggacagaaatgtgggttgcaccctatttccagctatcctaccaagtattgccagctcttggggggtttatttgtatatttcttttgactctctttgggggtagttctggatttgggagggctgcactctcttttgagaaccccttcttagtccatggtgaagtcataaaaggctctttggttttggttgagtcacttagtaggtactttcagtttaaaacaagaaaaaggtaaatgtatatgtttttctcttgttaatctgtgttttcttgtagtgctctcagccacgaaccttgagataggtgaggaaaatatattayttttcctcccttacattgagcaagatgctgtctgttctctgcaactcctaattgttctctcttcacctccattgtctgccacgaaaaaaaaaatgctacattgttcacacattaaaatggatcactcaaaagtgtctgaaaaaagcaagaggaaaacatatcctaattccaaatgtcaaaaattaagtggctcctccttgagactacctttttgaccccaagaaacaataagagagtgccctatacccagtgtttgacaaaccaatacagtactctcctgcccaaggccctccaggccttcaccacaaaccatgctgcagggacaggacgtaagcactgcctctgatatggagcacttgctgcgtgtctgacacacactttacatacacaatcttctctaatgcttccagtaatcttacaggtagaattttgtattattccttctctacagatgaggaactgaagcaggagaggttcagtttgtcaccagaaaggatgaaatgtggatttgaactcaggcagttctactctcttttctctttcatcccttgccctgtaatatttctgttcacaactcttattcatcctaagttcactaaagtactcagcataatactacacacacaatagtaaagaactcagtgaatattttctaaataaaagaatcaccaggaacaatgctagtagtttgatctyctactctgagcagtgatgctcagaatatagtagaggttccatcactgccttatcatgtcaccatttttaaggagcagaagacatgcacaggaaagttgccccaggaaatgttcacaagaaagaaggacacaggtagcattcttccccgtgagctgataatctgccaagctggtaccacccatgagattctagtgtggcattttgtatcattaattacttttactgaaagtaattaatgatgcaattcagagatattttaggggtgtgtgtgtgtgtgtgtgtgtrtgtgtgtgtgtatcaaagttcaactttgtctccctaatcctgctagccttctggccattctattaaggtattgcagtcctggtgaagattcagaaatgtgtggtccccgtcagcctacagggtgaacattttggattaacccagagagccttgaactctgtgcataatgtcttttaggttgtgtgttgtgaacaaagcaaaatgactgctcagagacagggttgtaaaagtttgtccagcaaaaccaggattgccaaatgagaattctggaaagggaggataaggattaggtaatgggagaaaagtgagtgaaggcaaggagaagtgcaaaatatctgattctagcctaaaaactggtcttggaaccatttggaagggtcattttttccatgttttattttcaatatcatcaccatcacttttatcctgtggctgtgaaaggactttcttcattccactccagaattcaaagaggcttcttttgcacaaatggagggaaggcactcatcacacttctcagccaaacatcctaagtgtgagagaaaacacactgcctacttctgaatttcggtgagggcagggttcagatggaacacatattttccaaaactccaaatagatctgggaggagaggaaaccattaaatcactagacataagtcaggacacatttggttttgttccctatcaaacagtccccccaaatctcagtgacttgcaaaatccatgcatgtctgagactctccagacaagctctccatgtgtgactcaatattgcacttcagtattaacatgcactgccacagttgccacagtaggggaagggaaaggtggatgggggagagagagaagaaagtaagaaagagagagagattgagcactgataattaagtccttccctcaaaaaatgatatacattccttctactctcctggccatgcagccactcctaacttccaggaggcaggaaggtaccacttcctccatgttctgaaggaaaggggaactggatattggtgaacacctgtaatgtttggcatgcacagctatacccagtgggcttgcaaatgtttccttcttccatattcacgcttgtatatacctttccctcagattacctggcatacatcaaagatttatggggtagtgttcaggaagaccaaacagttttgcagcctattttagtccacaggtgaccttttgaaatagaggggtagccargaaagaccagttaactctgggtacttttcccctagagctttcagacacaagtaactctgggaagggatagtgggttcaagggagccatggcctgatttcaatgacacattcaagatagaacaactagtttgagtgaccccagaccatcatgccttgtgtgaaaagacttttggaaatgtgcccttccatttccattctgccgcttgttaccagacrtgatgcacgttccttcaaagccctgtgacttttccagaaagcagctctccctgcaagagagagaaactttcccttattattctttcagtaatgaattcctgctctgaatgggctgcctccatgtgttttcagtcaagtgctgatggcagccttgcctgggggcatttccaaagctgaggacataagagatgaaggaggtctcatattgacaagagctgcttttggttttccttccagtttagccctcctgagccttgaaatgggagataacaaatgattcatcagttcttgttggtgaaccaacatgaccaccacacctctttgctcctttcaaccaatgaaaaaatcatgttttaaagctttcctcagagaggtttgtggacctggattttggtgacttaacagggatttaactttctcagaccaaaccagtattttgtagatgccaagacttcctttcttcaggtctcaaacatagacttcgcgtaccctgaggtgataagaacaaaggagaaattaggtcaccctgtttcctgcctaaaacctaatctcaagtacacaagctgcttccaagtaagctgtggtggtaggccatgtttgctgagagccagcccactcactctccctaaagcaaatgtcttcagacaataattcagctttcaacctacctgcatgaaacttgtacaaacttttagttacagttgggctattttctttctttttcttttttttttttttttgagacagagttttgctctgtcgcccaggctggagyacagtggcgcgatctcagctcactgcaacctccgccttccgggttcacgctattctcctgcctcagcctcccgagtagctgggactacaggcgcccaccaccacgcccggctaattttttgtatttttagtagagacggagtttcaccgtgttagccaggacggtcttgatctcctgacctcgtgatccacccgcctcggcctcccaaagtgctgggattacaggcgtgagccaccgtgcctggcccagttgggctattttcattgggaagaggagtctcaattatctccggtaaaaggggacacatactgttaaggatataggtggtgcagaattggaaagccttctggaggggaggcagccctgggaattcattatcctggggtctctgcttttctttacatgtctgcccagggctactctcactctcccagcagattttgtcctgcatactatagtttatttactcaaaacttcagtttgcacatggctcaccctgtgtttctctcttagcctttcaacttcagttcccattggcttttttccttggttaaaattctgaagagagaatctgattagctcggacttatcttagtgttttgtctcagacaacatcattggtcactggctaaccaaacctttgttggataaggaagtcgctgaaaacatagctgcccaagcagcaggaggtgtgggaaggccagcttttcctagaggggctgtgagagggcaagacagtgatgaactccagggcatgctttacaccctctaactggactactgcaagcatactcattccctcttgcttcttgctcataactgtagacctggtccccttacaccctcacagcctaggcatctcttttcactgctcacctccagcccctgactccaggatcttacttctcaccctgttaaagtgcccagtcacagaggtataggactagtgagtgggaaggaagagctgttgagatttatttaagaatatacagaagattagggaaggtgtgtaatgaaaagaggaatgaaaataaaatccctctctcagctaaagaaaattgtgttcccaccatgggacccagctacctttcctccttccaccagtctttggagttacttccttttcaaaaaaaaacagacatcagcagaagcaagaggagcttccattgaggaaccctgaccaagcaagtgggaagatattctctcttcattaacccccaaggtcttctctgtcccctgcaaggatcccttgtccctatccctgatccttgcatttctccagcccccaccctcaggtcttgtaaagtccagattcttgactaagaagtcccaaataactttcaaactaagattttaaaacacaagtgaaggactcggtttggatcaagtttttgccaattgtgttcttagtgcccaaagctctttattggaagttattcacaaatcttcatgatggtttttggacgactagtcacgtgtggtgttgccctatttcaaatgagtcagagaaattgtgctttatatgaattcatgcatcaaccagaggattagggggaaaactgaattgtggtagtatgctttaccatttattcattagatactattacttttgtacctcatcagatggctaaaagccaaacccaaaccaaatgtattcaaatttcagtctgcccatattatttttagtggacgtgagtctaggagtgaaggagaggctagtctaaatgtctgtgtttccttgccctttcttgaactccgggtatgtcaaaggtgattaaatcattggtcaaactttgtcctgtgactgacacttttatctagtgactagaattgcaacatttccctaggagcctatgatagtttttccaaacctgctactgtggggttctagtcagttcctccagagcacctccagatccctgcccattctatttagaatcggaggtttaagtctattgccactggctgtcctctggggcccagaaacctatatggggtttgtccagcctctcatcccagcaccatcgtccaaaccccacagtcattaccaatctaacagcttgaaagttgatacaaagatgaggcagaagccagtttggctttctcccagttctctgtgcccctccggagttaatcaacaacgacctatctttgtgtcaataacataagcctctctaactagaacacctggtgaaaagccggaggaaagcttaaaatgaagcaaattttgcagtgattattctgaccctcactgtttaagctggactcaggatctccagacaaaaactgcttgttaaacccaaccaactagttggatgaaccttaagccaccttgggttttgctaatatttttcatgcccacacctcaactccaaagtctgtaaactttaagcatcaactccccatttcaagcacacagggtttagtgagatggcctgagttcatctcgctggtagaattctttagtggcatctcctcatccctttcccaccctcaaagcccatcctgatggtgcggtcacaccactggagaaaccatagaccttcttaactgggattaccaacaccttctcttagtacgtattcacatggccttggatgttaggtgactgcctgttcagagaaagtggggagggtgaaagggagtgaaaaggcagagggcacatggacaacagttccttgctgtattcrtctgctcaggctgcataaaagaataccacaaactgcatggcttaaagatcagaaatgtattttcacacggctctggagactggaaatccgcaatccaggctccagcaggtttggtttctccggaggcctctccccttgtcttgcaggtggacgtcatctctctgtgtcctcacatggcttgttctgtgtgtgtgagctcttagtgtctcattcacttcttataaagacactagttctattggattagaactagtatcttcttgctttttattttctgtgtatccattgtatgttttttggtttgaggtcaccatgaggctaggacctcatatttatgaccttgtttaaccttaattacatccttttgttttatttttggttgttgatcatgatgtacaattcattacttttttttctttttttttttgagttaagtctcactctgttgcccaggctggggtgcagtggcacaatcttgactcactgcagtctccacctcccaggttcaagcaattctcctgcctcagcctcccgagtagctgggactacaagcatgtgccaccacacctggttaatttttgtatttttagtaaagatggggttttgcaatgttagccaggctggtcttgaactcctgaccagaggtaatctgcctgactgggcctctcaaagtgttggattacaggtgtgagccaccatgcctgctcattaattaccttcttttaaaggccttatctccaaatacaatctcactggaggttagcacttcacatatgaattttgaggggacacagctcagttcataacacctaccataactgttttcctcacagaacatcccttatcctctgatcttgcccttcttatctgattgggaaaaaagtagatgctggccaagaaatgcaagtatgactatgcagtttgagaattgctaagctaggtggggagggtgcatgagacaggaagaatgaaaacgtgggtggatggatacatgaatggatggttattacatggaaagacaaatgaatgaataaatggctttggcagtgtgttgatggcaccaggacagaaattacgttctgtttctttagggtttgtcttttttttttttttttttttttcaataatacagggcttacaaactcaaatgtgcatgccagacaggtaaaaagagttgcaaaaagaggccaggtgcaataataggcagttgtagggactgacagattagagagagcctaccgtatataaaggggcaccagttactgacaaagactctcattctgaccaaacttgagtcaggctcctctgagtcctctttctgactaggccccaaccttgggctctgtccttggcttgcttagtccagttttagcaagaatcctgctaagtcaattgagtgaaaattccccaccctttgtatttgatcaccctcagtacctaatcaaattcctcagcccccacccttaataccctatcacccttgcctgccttcagtaagaatcctgccatgtcagtttagcgggaatccccctagccttggtgtttcttcttagtaatttttcatccactgacatccaccctgctctttggctacacattatcacttttccttgttgtattcggagttgagcccatctctctccaaggctgcaaaaccccattgcagtgttccttcttgaataatgtcttacttaaagtctttaacaactgtcatgaaaaatttctctttcacagtctcagctctagacaattgttatcttgtgggatgctgrcctcatgttgccagaatgtcggattttacaagggaagccagaaatctgggttttcagataaattttttcactatttttattttatttatttattttttgagatggagtttcrctcttgttgcccaaggcggagtgcaatggcgcaatctcagctcaccacaacctccacctcccaggttcaagcaattctcctgcctcagcctcccaagtagctgggattacaggcgcacgccaccacgcctggctaactttttttttttttattaaatttttctttaaatcttgaaattcaaaaattataaaatattgtataagccaaatgaatgctcttgtagtccgaatgcaccctggaggctgccagatttcaactcttgggatgctagaaaggcatctgtaatgttatcacatgaagatatagatgcttgtgagtttaggctcatgagtagactgcctgggttcatactgcaatccaccacttactagctttgtgatctcaggcaattatgcatataattcttagagttattataaggttaaaattatttaatgcatgtaagtacctagaacaatgcctgctgcctagtaagaaagcagtaactgtgagctggtattattagctagtatcatgaaatctcttggtttccaataataccatttctgtaaaatgggggaaacccacttgccttttttaccccctaaaggcttgttgtgcaagtaaaagaacaactgtgaaagagcttgaaaaagtagacacattgctaagaaatacaccaggcatttctatgttcctattcccacagatgaggcacagcctttcccagtgcagggctgggactctgtaggaagaggaaaatagcagtaactagaaccagtcctttattcttctcagggtcatttgctgttttgttgttcttagaatttggtgagtttttctttttctttcttttttcaattatgataaatttcaacattcagaaaagtaaagaaaataatataatgaacacccaaatgcccttatctagatttcctaattattacatttggcagatgtgcttcacttggtgagttttcctggcagatatatgtgaatggaacatgcagagatgtggtagagaagtggggagaattgcagaataaagacagactgggaagctgagagccgtaactaccgcagcctctacttattttttaaacttgtaagatccaatcaagtgtggatggttgccttttggataggaccctggagaagggacttctgtgcagaatggtttgttatggagaatacattgttagcaccttaaagaaagtaatataaatgggataacagaaatgattttattatttatgtgattttaatttatttttaaagtatcaattyttttgcaaagagaatatattcatgtattgcttatgtcattgaaaattaaaaatttctagagagactttcaatgtggaaatgtctctgccatgaagaactcaggggttgaaacttgtggatctgagagaagtctgataaaatcagtgatttaaaaaatgttggtcactaaaattgaaaggttttaaaggcagaaacactccgattcaaagaaagtatatgctaattataagtgattcgtttctggtagattatttgaaaagattctctaagacatattgccccatttctcaacatcaactattactgcatttaaatgctaactcttctctctggaaaggatgtcttaacaacatgaaagcaactaaactttgctttaaaattctattattcagactccacattaatttaagctgacactccttctcaattggggcaaatcatcaaagctttattgtattgagaaccttgaattcagcaacaaagagcgtggggtatggagggaaaacgttgagaggggaagggtggagagctcccaaggccaaaagaagggaggggcagggaggaacactgcaggaaggacagcagagagaaagatggaccwtggagaggccaaggggagagcggggagttagaaaaaggctgagataagcaatgggaggcctcctcagaggggccttacactgtcaaactgcccctggagcctctgctcattaacatggtagaagcaaaactagcctacaactttgtagtcacaaatttttctccagagttatggataaaaagggagctaggagatagagaaagggaaaacattccctttcttcctacatttggatgcctctccaatgtccttcctaaggcaccctgcccagtggccagtgcctgccagtaagcccactccacagaccctgaggcctggagccccagccctggtcatggattagtgcctggccaagttgcactccaaccccaggcccgcagccgcccttcctcctcctttctgttgtgattgactctgagatatatgatgtgggatatactaggtgcaacgcatcatgttcgttattgaggcataaggtaaggaaggatcttttgaaatgtgaggacatcatccacaaactgtcactgaccatttacgatttataactagaatgtaataagatttataagatgcactttaaagcctaaaagaaaactgagttttttcaacatgtaacaacatgtaataaatattaatttcaaaaaccaaagtagccccagttggtcttttctctacaccaaaacaatcctcaaggatgcatgaaagcccatggacactgtggagcagacagctcctagtgtccagaaacccgtcttagtccaagtgggggggcactgcaagaattcagtccccagcctaccaccttccagctctgggccctcagagaatgcccatagccttcccgagtcccaattccccagtttgtaaaatgggaatagaaataatctgcctaatcttcatgccagggggcctgtgaagatgacagggtagataaatgattggttttccaaccttcatggaaggcctaagcctgagtctatgacctcctctccagttttaagacataaatcagatcatgccattcgtctgctcaaaactctcaagtaacgctttttcactcagagtgaaagtggagtccttccacaggcctagaaagccccaccgattccagcggcacctgcttcttcgcctctcacagctcctcgcttgctcacctgttgcagccacactgcctcctagctgaaccctctcacaggcaggctttcaccttagagcctttgcacttctgaacccttgctggaacccttttctccagagtaccatagctgactccctcacctcctttcctcacataatggatgactccctcacctttaagtttttgctaaaatatcaccttctctatgagactgacccacttaaaattgcaacccgctctgcttacccccatcctgctctacttatattttcccaaagtacttatcgctatacaaggtaataaataatcaatagctcacaatgtttacccttcattctgtgtcttctctgctaccatataagccctggagggcagccgtctttgatttattcatttttttcttaagcacctagagcagtgtcaggtatattaatgacctgcaataaataggttggatctttcttagaagtccaggatataacatcaataaaagaagggctgctacaactgaagggatttgtgrgctcaaaatccctcctgctatctctctacgagcaagtgcaaaaactgctgacatttgttcttgtgtgtgaaaccagttttgaagttacaaattgctacttgatgtcaggtccaagggcctacacaatagcttgcacatagcaggtgcccagtggtacagattataaggggaagggaagtaacatttgttgagcagctaccaaatgataggcagtgtctgtgcctagtgaactatagaagtgatttcatgaaactgtcaacccttctaccattgtctctccaggacctcataccaagcctggcatgtattaagtactcagtaaatgcctgcttatttccctaacaaccctctgaggcaagtaccattatccccatcttggaagggcccaagattcagatttagatagcttgcttaatgtcatacagctcgtgatcagagccaggatttaaattcttctcagacaagctgcagcctctctgatyctttgagagaatgtacattagcatccctccgagcttccctgaagcagagctgtctcccagcgacaccggagatgaggggaggggtctctttctccacctggactcacttcctccctttgtgcatttggctcacctggaggggtcccctgctaccttttgattaatgggtctgcccttcccatccccccggccgaatgaccccagagttagctgcagttcatcttgaatcataaatcaagttctcaaagacattgcagctttgtgctcaaaatctcactagaattcacattctttgtgaaaggcatttgcttatgagtagaatgatggattcatcaagtctctccttttaagaaaaatctggatggtatctgctggtttctccctgctccctccaagaaaaaaacagccctagttactcaatttcatgtagttagaattcccccaaggacctcatactcagcttccaccctggccatactaaagaagagccccaatcatgttgccattttacatagatagaaatcatttgcaacttgcacatttgttgtgctttccatatacccacgattagctcggattttattttttagccattgctgaagtgtcacgcgtcagctatttacactgtatggggacaaaacaacctaatgtatgtcccagacctattttatagaagccgagaggcagcctctgagtctccggttcccagaactctagccctgggagaaagcatatccataaatctcccaatgctttatgccaggttagaatttctcttgggaattttggagtttgtataagagttgcctctaaaggcaattgatgaactatagatgtcaggcgggttttcattttctgtgtgctttttatttcatctagaaccaacagtggcctttagaattggattcttttcagagactctctctataggtttcatgttcaaaggctccaggttggaggagctcgaggttcagctgagtgtcagaaatgaccaattctggctggacgcagtggctcatgcctgtaatcccagcactatgggaggccgagggaggcggatcagttgaggtcaggagtttgagaccagcctggccaacatggtgaaaccctgtctctactaaaaatacaaaaaaaaattatctgggcatggtggcacatgcctgtaatcccagctactcaggagactgaggcaggagaatcccttgaacctgggaggcagaggttgtagtgagctgaggtcacgccattgcactccagcctgggcgacagagtgagattccgtctcaaaaaaaaaaaaaaaaaatgaccaatttcaccagtactgctctattagaaaaagggtgggggtagttcttcggttttgtgactatcctgtgtactggaggacatttgtacttgcagcctcatccagaaaatgccaggagcattccccgaggcactctaacagtcagaggtgtctgtgggcaatactccaagcacccccggttgaaaacaccaacaaggctatctctgaaagacggtgaactggggcagcaccactaagtttcaccatcagtgaggcgtcagtctagatgggcactttctttccactgtaagctgcttcctaytcttgttgcctttgatgatctttgtttgccttcaagtcgggtttgttacatttgttttcatctccaattcctgccatataaaaatgagggcagtgagaaagagaaaggaaatactgaaattttccctcggactatagcctcccaagaagggtcgtgttctctggaatgacttttaactctttatccagttaatgatcgggaaagtttactagatgtaggttcccaagcccagcaagcagagtatgygataagagatagaaacagggacagaaaaaaatggatccatcaggacccagacattggggtgcaaccagtgggtcttctccagctccacagcgcatcagttctgactcgcttgtagattcctgagtactgctcatctgccctacaaggcatagtgggttttctctgatttctagaaatgtcagcattctctgcaaggtgaacggccagagtcgggatcttctattcaggcagagattatataactccctgggccctggaagagcatgactgtctaccaggaaccatccagagaggctgtcagatgaatcagcatctgttcatgccctgccttgcttctcctgggcatgactgcctcacatgccaacacccaggcttacaggtcaactattccaaccctgcatcctgcccaccccacttgctggggagtgctctctacagctctcagtgcatcctgtttgttcagacccctttgtcttccactggcgcaaccgagagaggattcctccgagcccctttgcttttggctttgaaatcagatcctggcacacctgattatactcaatagctggaaatggtaaggatgtccgatggcagagagctcttgttttaagttctgcatgccaggaaggcagggggctgggtctccttctcagggctasgctggaggggcaggatgctctagcggaggaagcagtgttaacttgaagggaaacgcagttgaaaaggaactcgaagcacgggctgccaagcgcgtagaagtggtaactgacgacacactgtggggctcagaccccttcctctctgctcatatgcccctagatgggaaacattcagttcctgctcaagggaaccaggagaatcaaacctgtctgtcctgctttttctgtagaagtgtcagctctgaggccttgactaggtggaataaatagtgacttacckcttaaccacagtgaaaaacccatcaagcatttggatattaagggctgcccctgtgttctcaagggaccctcagcctcagacactgcctcctttcaagcaaagatgctgccctaacacgcaagtccagtggctttaagagtcattatgaaaatttcacacaaaaaggcacaaagagcatccatgtaccgaaacccagcttaagaaatgaaatgttactgatgcaattaaagccgcctttgtccttttggtcccatccttccatcctgccttcccccagcagtaaccactcagtcattgacaaacagtgtgtcaaacatgcacaaacggtgatgtgtgcatccctctttggaattacttaacctttttgaacctcagtgtattcatcggtaaaagggggctactgacaggatgaaggaaaatgatttatgacaaatatttggctgttgttcctataaaaaggaaaaagtcaccggaaaaaatgggtcaaatgtaagaccctttccagcctggccccaacttgccccggcagcctcctctcctcttgtagccatattccctcctctcctctctgcagcagtgttccccagatatgccacctgtgtccatgcctctgggccaatgtggatgctgtgcttacttgcctgtaatgctggtctcctgtcaccatcttcctttaacactgggctccactgtccccacctctgacagggcccagatgcagtgactccttggtgctcccatggcctgatacctctgtctgagcacttgccgtatggctgtgatgttcctggtatgtctgcctggctttttcactgagctgcttatgcagcaaggcagggatggggtcttctccatccagtggcctggcctattgccttctggcgcatggcaggaccatatgcagtgaatgaatgaattccattaagaacattcgtgattcataggaggaggtcaaaatatcaacattaacaggagcttggaagaagctgatttccaccctcatgaatgacttcaagggttcaggtgcatgagtaaatgacagttccatcaacagactacaactttctgccctagttaacacagggcatctccatgtccccagttctccctatgggcatttttctctttgaaattccaaatcttttctgttctagaagcacraaactacaagttctctctcaactcttcaaatgaggttggaacaaacagaatgggggcatgaacttttttccccataacttyaataaacaacagttttagcctcagtaggctttatgcaagccttcaacatctttttctaggtatcttgacactcatgttctttttcttcttgcagcctatggaaattcctagagacagataaatgtgcaaacctgttcatcttgccaagaaaaatccgcttttctgccacagaaacaaaatattgggaaagagtcttgtggtgaaacacccatcgttctctgctaaaacatttggttgctactgtgtagactcagcttaagtcatggaattctagaggatgtatctcacaagtaggatcaagaacaagcccaacagtaatctgcatcataagctgatttgataccatggcactgacaatgggcactgatttgataccatggcactgacaatgggcacacagggaacaggaaatgggaatgagagcaagggttgggttgtgttcgtggaacacataggttttttttttttaactttctctttctaaaatatttcattttgatggaggtgaaatttatataagatgaaattaaccattttaaagtaaacaattccgtggcaactagatatcatgatgtgcaaccagcatctctgtctagttccaaatattttcatcaccccaaaagcaagacccataaccattatgcaagtgttcctatttccccctcctcccagctcctggaaacccaccaatctactttgttgctatggctttacctattctggatatttcatataaatggaatcatatagtgtctgtcttctttcactagtatgttttcaagtctcctccatggtgtagcgtgcatcagtacttcattctttttatggctgaataatattgcattgtcaggatatactgcattttgttcattcattcatccgtcagtggtcatttgggctggttccacccttcaactattgtgaatattgtactgctatgaacttgcatacacatgtatttatttgaatacctattttcaattttttaaggtatgtacctaggagtggatttacttgacatatggtgattctatgtttaactttttgaagaactgcaatactattctccacatggctgaatcattttgtatttccatcagcaatgtatgagcacaggtcagattttttgggagtcacattttaaagtggcacaagacccttctagagggctctgttccatgcacacaaaactcatagtctccacgtgaagacacaaatttttcacaaacatgcaggcagagaaaggagagaaagtggaccctcagcagacaagttgaaagatggttcagagaagcagtggacttcacccatcatcttgctgtgctctccatagctaagcaaggggcagactggagattccactggctactttgtcttattttcacttctttccagttagtccccactactctaccctttccacaggactgtagggttacggtgactttcctacccctagccaggttccagtggtgggggactctgtgaatataggatctagtgttcagagctcccagatttgtgcagactgaactctacacatgctacttgtcaacatctgtgagccagaaataggaggaacacctttaaaaagaaacctacaaacacaaagttattcatagatgctcttgaagggcaaagcagggccaccaccagagccccatgcaattagactcatcagagggaaagggcataacactggcttttttcttaaaaccacctggaaggagctgagacgtatactaaatgtatatagaagtattatttgattggaagaaacaaaaaatgcattgtattataatctgtcttcccttgccgtctggtagcttaactgtcagcaattttggaggaaagcccttcccagcaggggactgggaacccctgggcaatgtctttcctatgacacatggatctctatggttgaataaggggctgaaggaggaaatagacaacaggggtcagagagcaaggctagaggaggcctttgagaaaagagagttgtgcccccttttcagtgagtgtggggcctctggaggttggcaagaagaggagaaggtgaagggtttcagcactgagagaatgatgtttctggtggggctttgccagaagggggctcatcacatgtgagtttttgcactcgtaagcctaaggggcacaatgggttttgaaatcccaacatatccaactaagaacaggaagccctgggactcagcacagacttgagtcccccattggatgcaatgtttcttactaagcggaaagaacttgttttcactccctgccaatgagtaaagaatgaagagctagatttttctttgaaggtggtggatcatgacccctccttgagactaagcaaagaagcactgatgttaccatggagaggagtgagcccctcacccaccccaggtgagaggtcttatcctgactttttagtcataatccaatgtgatattttgcagggttagtggatgcagtaggttaaatggtggctcccaaaaagatacgtccatgtccttacccccagaacgtgtaaatatggcctgatttgtataaacggtctttgcagaggtaattaaggatgttgagatgagatcatcctgaactacccaggtgggccctaaatctaatgacaagcatcctgataagagacacagaggaggacagtcacaaagaggaggaggcagtgtgactacggaggcagagactggagttaagcagccccaagccaaggaacacctggagccaccggaatctggaagaggcgaggaagaggtctccccaagagccttcagagggagcctggccctgcagacaccttgatgtggggcttctggctgccaggactatagagaatacatttctgtggttttaggccactctgtttgtgacactttgttgctgcagccctagaaaactaatgcagtcaggttgcccagagagatgaaatgactggagagagagagaatctggtcgtctagaaaactgagttcagcccctggacttgctgctggggtctgaggtgaactttcctaaacgttgtgctgtggagtctcttccctcttgcgttcctcatacattaacttctcatggcagagatcggagctcatggttcacctgaggacactactaaggaccaaggaagttcaatcagatcctcacatctatttgaaatagtggtagtaataatgaccacactctatagaatgtttaacatgtgctaagtatgtcacatacattatcccatttaatcctcgaaacaatcctacatggttgctattctcatccccatcttacagatgaggaaactgaggctctgggaggtaatggaatctgctcaaggtcatttggcaaatgctggtggagccagaccttggccccaggtttgcctgtgcttaagccacagtattacagaaggctcaagacccacagagatggtcgggccagcagcccgtagcacccagctgtcagatgagaaaggatttatttattgatgtatgtattttactagcagcactggcattagagtttctttgtcagtgagggttggagtgatgggttgattgaaatgaaggttgctgagatgacctggtgggtcctgctaacagcagatggatgtcaaaacatttgcattcagggggagataaagtcaaaactgggacaaatcaactttctctcagctccagggctctaaggtcctttcttcgctctcagccttgttgggaaaagagaagaaccccctgccacatggtctctctggtgtgagaagctgacagtccactgctgagctttccctgctttgccacaaatagaggcacctccccacacaactccctctcctgctggaatgggaagagaggacactggctgttaagaagagctctggggatctcctgtcctggggcaaactcagtttctggagtcccctcttatagggctaaacccaggtgggctctgactgtttggggtccctgtgcctctcacagtcatgttttcagagttttgggagatctgggctggtttccctcttgccatggttcatgctggggtgtggccaacatggcagcatctcccctgccctcccagatttcaggttggagggagttcggcttcagagagacaatccacaggcctgcagatttcctcccatgcagacctcagtgcaagataaagtcaggcaaggctgtgccacagcacaacagcataataaatccccctctggcctcctcccagacttattgttctattgcagttgttttgaatatgatcaaaaggaaggaagagactatgctatcagactgaggaagaaggatgctctcctgaccgctcctgttgcccttggccaccttattttaaatatgaggaaaccaaagggcaacgtgcagcctaaccccatccacatcatgaggagtgatgagctgcagccaaggccccatggagctttggtgaggcagcaacccctgtgcaaactcgctgacagctaccttagatgtccagccctgtccttttacacaccatggggggctggaaggcccaagcacagggtcagcagcactttgaggctggagccggaagtaggccctggagcagctgaggtagctgatgttaaccccttggactgagaactaaggctgtaaggccacaaccgttggaaataatgggccagaacaggaactgcccaagctcagctggcccggtgcccacttctcaagatagtgaatggctcaagttctttggaaatgttgtcaatgtcagggctttggccttgcctatgtgcagcccaggttcaggcacaggcatggggtgggctgtgacatcggccaccactgctggattcctgcaaggaactagagcagaaagcagcgacttgccttagccttcaaaggtagaaagggcggagccgagtgttcctcttcacagacttgcaggctcacacagtcctctgccctgcccaatgcccagatgctgattcgccaggtgcctggctgccacagcccggtcacctttatctgggctggaaggccacgtctgagccatcaaaggagcctcaatgggaggggacgtcaatgtgcttcctcaaccagaaaggtggtttgagtttggccaaagcagcccaaccaaataagtaaaagcctgtcaatggaaagatgggggctgctgggagatcacacgacaacagaatgagaaccattatcagtctcatcccagcctgaaggagggagagcctttgaagccacagacaggctgaacagaactttccacctgagagacgctggagatgggaggtcaggctgcactcagcccctacgaaaactgatcaaagcctgctgcagaagggaggggggcgcacagctgcagttccgactccccccacgggccgcccgggactttctgaaggcaacagggctgcctttgcagggccctgtgggaaaacccaacacagatgcacattgcagccaaacccccaagcactgctgggagagggaaaaataaacccctcaatagtcctgaaaagaaaagggagggaatcaaagcacacaaaaaatgcaaagaccacccacctgatgagtgcctacctttcggaaacaaataactcctggcttccaaggcgcacttctaaaagaacagacggactgaacactgcctcaaagctgcatgcaccaggggatttgtgggaagctgtggccccttctaagcatcggaagcttaatttaaagtgtgttggcctctgcggtgcctattcaagggctcccttgcatccgctgtcctccctgggaacctgggagacaagaatcctcatttagaaaaggacaggatcctgtgtggactcctttatcgtggttctctcagacaggacagccatatctgccagggaacattctagggggcatctttcaggctagatccagggtgatgtgggcccctgcgagggcatcttggaaggctgtgttggttctgcctggactggtccctctgggacagcctcagcctaccctgcctggcctcacccctcctccctctgacctgaagctcctttggaggactgacacttcatggagcctgcagtttgatcttttctgaagtggagacaacaaagcaaagccacttccactgtgtgctctctcaaaagaataggaaagctcttctctcctccttgggaatggatttggagggagggtggagggcgtaatgatggggaggccttggaggtattttggtggaggagggtgtgtgtggaggaaatgagccgcccaggagcatgggagaaattgacatgagaacatttcagaagcactggtttaaccggctgacattctttccaaaatggatggacaagcctttaggagtagacagagggcctcagggaggagaaacagagctgaggaggaggcatctcccttccccctcctccagaggctgatgctacagagaaggcggcaaggcctcactgagcgcctacccaccactcactagatttctatctttttattaccttaccctgggagatgaatggggttatctccattttccaggtgacaaacagagattcagagaggtgacgagaggctctccaaggacccatatggaagtgtcagctggaattcaaccctcaggcagcctggctccaaagttcacaacctttcctacttgtttcagccctgccctgcctttcagggctaagaagatgttagtagatgttccataaatatttattaaattgaactgaactcagcagctgaacacacgcaggcctcttccaccctgaccaagaggaatcctttgagggtctgcagtatggaaagaaattctctgaggcgctaaataaaatcctgctctgaggtgcaaggaggactt

SEQ ID NO: 97345 - DNA, 12947 bp, Homo sapiens
tcctgcctcagcctctccagtagctgggactacagatgcgggccaccatacctggctaattgttttatttttagtagacatgggatttcaccatgttggccaggctggtctcgaacttctgacttcacgcaatccgcctgccttggcttcccaaagcgctggggttacgggtgtgagccactgcgcctggcctcacgcttgtttttatgtgttcctctccacctctgacccatgctacccaagatccctcactcgtcttgaaagagggtggggagtccccactctgccacagactggccatgtggccatgggcaagaccctcccgcaggctgctgcttcctcacctggacagattctaacatcaatggcttgtaggctgcctgttgaggacttagctcggtaacttctcatgtggagacatggaaagctggtctctttggctcagtcttaaggcatctggaaaaacctgagctattttccagcttgaacctcacagctcaggcggttttcccttctttttcactccaaactataccaaactgcatttgtgccctgtaggaagatatgatttctagacttaatttttcttccacaggtaatcaatagcttttaacaatcactgtgtgtgtctcgtggtcttcaatgcatttgttatgcagagtccgttattttcacgtcatcaatggggaaactgaggctgagagaggtgaaggaagcccaaggctagtaagtggtagacagtggatttgaacgtggagagactggcttctgtagtgtactgtaccctaaagataatggaatacgcaaatacatccttgtaagaaactgaaaaattataactgagatttaacatcgctttcagccccttctcatgcctgtccttaattaattcattgtgcaagtaagtgagggtcaaagagtttaattttttatggtggttaaagaatcagggaagtcaggggttatgaagacaaactctagaaccatactcccacatacaaagcctggctctacccctgcacttgctgggtgaccttgaacaagtcacttgacctctctgtgtcttacttttctcacttaaactgggaatagtaacagtactttcatcgtagaattattgcaaggaataaatgagttaatgcctataatctttcggaacatatcccggcataaagttagccctcagagattattttttatcaacattacagtcatccaaaggttagttattcttctttcaaagatacaagacacagactagatgtgcccggacactgatgtactctgagatgactttaccaatgtccccgagagactgcatttgtttcattttattcccctgaaagcagcacagcattgcaattctggttagtaaaaggttctgggtatttgggtggaatttgtcgtacgcagcctgcggggatgagttttaaaactaaaatgttttattttaaatgaatagatcacagggaaagcttcacatcatcagattcgtgtttctgaaacttccctcatgaactctgccatggctgtgtgccacttttgctatcaattacttgatggacttggtttttaaatcatttttgtcttaagcagtaaaaaattgtaaaaccatttgtttcaaatgctttttatatcttttccaaatgcataataagatagagacagaactctaaagaaaaaaaatgtccatgtacatttcaagttaatgtggaaagggtgcccacatcattaaaaagaagtctgcccttcagagactaacagattcttccagaatgtctaaagtccccaaacggtagctacctgaagaacagtaaggaatgtgcctggggcaagtaactttcattttctcccctttctttgagtactcctgggaatgggtccaattccacagtaccctaagtattccactgtcattttatttaagtcgtataacaaatcctatatagaaggtgtctgctccatgggctgatgaggagattggggctcagagggctcttgtgatctgcccgaagacacacagcaggttggtgatagaggggaccccataccctctccaggagctgcccagcctcagacaactctgtctcatggtcccacaccatagccaagggcctggcctggtctgaggaggaagtcacttcattccggttggcaagaaatggcagggattcttgaaggatttcatccagaaaaggattttgcaacccacttacgttactttttccatgtgctgttcaagaaaaaatctactggttctcaatggaatgtggggtaaaaggccacagcaactcaggctcattgaggatgaaggatgctattgaaatgtaagaatagatcataaataactggttggtcaggggagtctctccagtccaccatgattgtttgtgaccttgttccaggagggctgtgggtcatgtggtacaacaggcccatgctttgggtcacacagacctggaatggaatgccgctgggcagtcactcgatctgtccaagtctcagtttccatgtttgttaaatggacacatgtatatcatgtattttttttttttgagaggattaaatgagctttgtgaaagtgtctgtcacataataactcctgtgagccatttttatgtctccttcttccctcctccattctcctccctgaatagacttttttttaatttataactctcagaggcatacctgtatactttaatttttcaaagtcccagaactcagggcaagtttcattcattaggtaacagcagaagattaaaacatccatggggagagctaaccgttcagactcccaccaccactttatgcagtaggaggactgtctctattttgtgaatagggaaactgaggcagaactaggacttgaacctaggaatttgggctccccattctggattcccagtgatacaatccgccatctgtaaaacctggtgaagactacaatgttacaacttagattaggtttgctcatatagcatatcagatctggaaggttctgagtgggcaccattcaaagccagggttgggaggggccgtgcgtctttggcaggatcgagtagcaggagaaaaatgagaaatattttgtttttcttttccaattcattaaggcttgttgaggggagcaagaacctcatttttttccttcccattacttcccttttattttaggggaaacatgcatttcaaagactgctcaatagcagcgttgaagtctcaagttcaatcacaatgtccccattgtggctgggggactccctggcctttaagcttgggttataaaaatttggtctgagcccaaagtctggctttaatagaatattttaattttgtgtaatgaatattattttaaatctgtttggcagttttaaaatgtgttcttttattttcaaattaaaatttactaatgttcagtgctttcttgggggtgggggtacagcaagaaatgggggtggtaataatacaagctaccatttattgagtgcttactatgtgccaaacaccctgctctgtgctcggtgtgccagccactcttttaagcctcccaaccaccccaggaacagttaactgctgtctccgatgtctgggacgttgagagggtcagacccctgctggagatggcagtccgtgagtgatggactgactcaggctcaggccagatctgtctgagtccagggcctgtgctatcgaccactgcccaacattctctcgatacctaaaatgactcaactgatcaatagcttatagacaccgcactgatccagtgcactgttccccataatctcaatagctagctcattgaacattgaatggaggcaggcagtgtagcaaagctaagtgttttccatgtatcgcctcatttatattctcacaatggcactatgaaaagttattttattattgttgttactattattattatcatcccaaagagtctaagtaatttgcttcaggtcaaattcataaataataataataactgtagctgacactgatataattcataccacttgccagccgtagttccaaacacttcatgtttattaactcaatctccacgatagctttctgaggaaggtgcattattattcaccctgctttacagacgaagaaactgaggcaccgaaaagtctggtaacttacccccaagttaaacgcaggagtaggttaacactgaggggaagtgtaacctgagcagcctggctcctggactcaagctcttaatctcgaggctgaaagtcagtacccaggctgaggtttggaaagtctgattctctacattcctcctcattctgcacaacgcattgagggaagcagagagttgctgtcggccgagtaagcctggggcactggtaagtcctatatgcctagtgcggtttcaggtgcagaagccgaggcactgctcttactgaaccaggcatagcttctgtgggtgagggtctacagactgaggtgttgcttccattctgctgctcaaacattagaaagctcaaaaagtcatgtcaacaccctctgcaccctcaggaaagaagaggccatgggatactggtgagaacacattgggatcctcctaccggagatgctggatttggtccttctcacctctggctctccagtaaacagcccagaacacagctaaataagtgttgttaagtaaatggatgaaggaatgaagtcacttgtaattttcccctatcactgtgcaatgtgtcaagcacattggaggcacctgataaataataaatcattgaaatggtatacgaaatgtcccaagtgcatgttatttctggtctacaaggattgtcttgtcatattgcaatagcttagaggtcagcaaactttttctgtaaagggccagatagtctttgcaggccgtatggtctttgtagtacggctgttcaaccctgcggttatagggcaagagcagctgtaagcaatgacttaggccactaactgcagtgatgctacgaccatttccataggtccagcttgaaacattcattcatttctacaagggcagattcaaaatcttgtgagaatctgctggcgtctcttactttctcaacctgatttttgtacctaaccatcgataaatatccataaggcaatgcaagtggaaaaggactttaaaatctagctctccagggcagacagatggagaaagggaagttcttgttataccacgggagcaggctggacatcctagtggttaggaatcaaaactgggtttaatcctggctctggcataagccatgtgatcctggacaagttactctccagactcagtttccacatctgtaaaatagaaataataataacagcacgttccatctactgccatttggagacaaaacatataaagtatttccacagcacaatgcctgggacataataaatattcaataaataataagtgttcaataaaacctgtgattcccaaacaagtcttacaactctgtgttttcttaaaaacaaaagaaaatccccaaaactaattcactaaaaataagcacaaaggaatgacagcaaggctacaggaagacatttccaaaatcgggtcccaaggtgttagaaaaattgtccactctagatcaaacctctagcaaacccccaacctctctgtgcttccccctcaaaaaaagcctgattctatgtccttttatcagtttgtctttcttgtgggtgcctgagcaatgctgagacattttgagcgttttagacatttgctgagtttaaggcattctttctcccctcctaccggtcttctctccacaccccagccattaactcctccagggagtatggtctgtttagcaagaggagagcactggacagcttgggcccatcgcagaccggaggtgaatcatcttcggggctccattctttttcatgtctggacggggctaaaactctgttgacaacacaggcacaagtcacaacttgttataccacgtgacaccttccgagcagcggaggcttccctctactctaggagtcacacaaaaggccaaaggtrcacgattctcctcggggctccttcctctccgctcccttcccaaccaagaaggacacgcagaactttgctggagagatcaatgtttctagaacaccctgaaacaaaagtcctgatatgtgcaaataatacacacccacaaaagaaaataacctctttgcgctgacaccctgcctctccgaagaggacgttttctccctacttggaatttccatcagcacctgggttggtaccaaactcaggacgtggtggacacgctctctgactctgtatttcaggaagctgccaatcaatagagatttaaaggtgagtacttataccttgcatcttaaatgctagaaaacatagtgggaacaaaaaattgttttggaaaccatgaataccttaaccacaaagtgactataggaagggaatgggaggtgaagaaactgaccagaaggaacattttcatttcattttattttcagcttctgacttccgcatatccgaataccaggtaggaaacatctgctttggagtaagagaaggccccagtacctgctttttctccggaaccgtgagagggagccatggggaggagaccagaatttcagccttcctatctccctttaccacaaggacgccttgaggacccaagtcaaattgagatctttcaaccacgggctcggaaacccgctttctgtgtccacttcaaccaaacacgtctaacaggcaggaatttagaggtggccaaggtaacgagaactagtggttttcaccctgtttggtgaccttcatagggcttatttatgcacttcaagygcatgacctaatacatgttggtttggcttctcttctcgtaatagcagcctgtaaaaagcttttgagaattccccgtgttttctcattttgggtcaagaaaataaaatcgatatctaagtaaccttaaaaaaatggcctgcacaatctaaaaatttggaatgtttccactaggactaaggatatctctgaaagcctcaaagatcatcaaaatgaagtccaacatttgctgtttttaaggtgagatatttggtaacggagtatgagagaactggctaagggggctttttgacataagtcaaacaatgacatttaaaactcacgtaaaagcaattactgtgtggaatttttctgtgtttttctcatttcttaaacagaagtgtatatgttttcagcatagcttcttgctgtaattttctttcttgacaaacccacatcttaccatgaaacccaaagtatgcatgctgcagaaacaataatggttgaaacagacccggctgtctctggcatgatttttctttacaaaattaaaatgtcttttggctaatacacgtgtatttcagttatgaaaggccattcttgggagatgaatagaaaagaaaggggaactgacagatttagctgacgcgagacaaaagtaagttgccatatacagtagtcaaaccctccagttcctcattctttggggaaaaatatgttgattttatcatttttcctttagttacattagcagagagttgacaattctcctctgaatgactgcaagtagatacgttcgtatctattacatctgggaacacagacttttaaaaaatgtaactttactagatactcaaaaggaaaaaagaagaagaaagtgcaatgccattgaaattacacacattttcatgttactgacacaacactattgataccaaatgacaaaagagtttctaacctctattacatactttgttcatttttaaagatgtttaaattggcattgcggcgcgtctaagttcctgttttagatttctgcatatatctgaaggcagaggcagacttttcaaaaatgcacgagcaggcacaactgtgttctgactactatcatccaaaggcgatgacagcgctgacgaagcccctggatcctgccaaagtttgtcccaaagacgagtctctcagcccccactgacccgcagcctgctggttccagattcaggcaaccagtggcctcccttaacgttcaaagaggcaaagataaatcattccagctacctgactctcggcaccacctgttccaaattattctttgctctccaaatgtttaaaatctaacccgaaacaacacccacccatagcgatccagcaccttccggtaaacttgacttgggctgcgcctaccgtaatgttttagggcctctccactgccggtaaatttattgactctttttaggacctgaaatgcgtagtgttagtatcgaaggaataaatcaaattagcccttaaataaaccgtcattttcctttacagaaccatacccaaccggttaagggtcatggctcacagaggtttgtatttgtgttcctgaatatttaatatgattttgtttccccatttcaaacgacagtggcaaaaaacgtcagggcaggttcagaaaataactgtgttctgtgcatttaaaaccatccaaattcagcatcttcctccaaaggaaatgatagcagaaatgttttgagccaaagcttgtattgcacatggataaggcatactttgcagagaagcaaaagcgtagatttcattttcactcagtctggccctgtgtcggtcatttgacctgcgactcagtttccttgttaacaaagttgaaataatgataataatactcaaggggttgcggcaagaatccactttaaaaatacacgtgaagagctgactgcaggcctggtataccagttctcaataaacagcagctattttcatcattactattaaacagaagggtataatttgcaagtcagagaaatgacaaaggaactcaataggatgaaaatgaacaaaaagaaatatgcactaaaaatgaatgtataagcctgtggcttccttcatgccttttcctctaaatacacctggcaggtaccttaaaactgattttaaatcacacgccgtaaagaacaaggtcttgcccctctgattcatttacaataacacaagtgggtctgcagcctcagttactgtcacttcaagtatttaccacctgacggagggggtgtttatcctcctccgactagaaaagggtgttagtcaaacaccattaggccagttacgatcttcaaacagtgaaaacgaagcattgtctccagcgaattctctgctaattgttttcttaccagaatcttctttttgttttgtatgtttaggactgtttgaactgccacaaatgatagtggggagaagtgggccattcaggaagctgttatgacattgggggatggagatcagggaagagggttgggagtgagtgaagaattgtggtgtgtgtgtgtgtgtgtgtgtgtgtgtgttttctgtcaacaggctgtgttttcttaactctgggattaattctttgtaaagagattccttttgagcacagtctaccaactcctttttcagaacagttagctaaaaaaaacaaaaacaaaaacaaccaaaaaaaaaaaaaaaccaacacaaaaacccaaaaaacccggttccttccaccaacaaaacccagtcttagtcagaaagtccagcctttggaggtaacagactaaccaactccttcaccctcacaaacctcacagataaggggaaccacatcattaggcgaattctccctttatcaaaagtctctgggggagcaggttctcctctctcccaaggaatttatgtcaggccaggcagtctttcttttcattttgtgcccaggtgggaagcagttaagttttttacactgccccgcacgtgacaccaatccttctccccaagcctttgcacacacacacacagcatacacctaagacctgaagacactgcctaatacttataattgattctcccccaagcatctttgtatgaaggaggcctgcccagcaaagacaaaactctaccccagtcgcaacttccactcctccgctctgcgatcatgtgcgtggatacttaggaaaggcatgtgtctaaagaaggcacctccactcccttcattttctcctgacagccacaggctctcttctctctctgcccagaaaggcatctgtcataagcggctgggaacctcacttattcaccattacggcctgcgattttattatacaaggagtttactgctggcctaattagtttcaaactgggcattccagctgaggacacctaaaaaacatctggtggaaggagagagaatgagtcctcgctctgagctggttacggttggatttctgcataactctgctctcttgcgcccgatgcaagttgtctttggaaaagtaactgaaaaaataaggaaacggtttcttctttgtgggaaaggagtcatcttgtcacggaggatccaacaacgtcttaaagtggacgtgcttggactgtgtatattttttcacaaacggctggggtctccatagcttgctcaccctaattcaaaatgtacttagctacaccacagagcctttttgctgagggcttttccattctcccaacagcagctagcattttatcaatttatccatctggaacaaggtttgcaatctcttacacgcaatttaaagcagaagtaataccacatatttgaaacagcgtgtcttgggcgtttttgccaaatggtaatcctataacaagtcaacaaatcatacctctttatgatgtgtttaatgcaaaacaaaagacatgaaaagaagattctaaaacttacgcgatgaaaacttttaaaaaaatcctaaagtattgagatacacatctttttattttattttatatttcctttagtttttctgatattggggaagtgatttgtgtgtttatagagtattctcatacacatggtcacaacaccaggtgagctattttaagacagaaaagaaaaatgccaattcctttcagataaaatagtgaatgatattgtgaagctgaagttacaagagaatggggacatataaactgctttaaagtaaaaaaaagttcaggctcttttgcatctaaccacattggtcttttcacaatggcaaaagttaagagtttgctacgaaggcaaggagattttttttaatacaaacacaatttaatgcttagtcaaaagcaagattcaaaccactatcatttgttatttgttatataaattatagaagaacttacccaagtgtgagagtgtctaaatgcaaagatatgtaaaggatgaaggggcttaaggtgatgaagaaagacaagtggaaaaaatgaacatttatttatcgagtaaaattgtgaaagattctttcacaaagattattttgaaaaagaggttctctcctcccactctttctttgtgtacctctttttttttttgtaagcaggatggttacatgtgtatgttagttgctaacaaatgggtcatagtctggtaaggtgcttactagttctgtatctattatggtcacagacatttcactcaatcaagaaacggctcatgaaattaatagattcggtttgaaatacaattgtccactggttataatttcctttgtaagggatctccctaactcaaacataattcagtgctcaaattcttacatgatgtttgtaaatcatcctcctgcccctccgccctcgctaacagctagattccaatgttcagctcttccactgcacctcgtaattaaaaggtacctcttaccggggtgatttatacctccacgttatattttaaaaagtaattgaagattacatagcatttcggggaaggggaaagaaaagaaaagggtatccataaaaacgcagcatcggtcttgctttttaaaaagaattcagaccgcggcagggtgcacgctgtcaactctcagcctcggcttcggggaagcaggaacctcgcactgcaaaaggcgcttccagttcaacagctgagaaaagcgcactgagtcttttgcgataggagtacgttcaccagtcacgctttcctagtattccttgagcttataaactatttattgctgggggggaggcaggcaggaatatattgaaggagcctgggccagcacggccgtttaacctccagacttcatgactaaaaaacaattccatttcccactttctcccattacaacgaaatccttgccgccttctaaacacccttcggatgtaaacttttctaagtttcaactctacccgcagcaggcgccaggattccctgccccggttcaaagccccagacctgaaccagagcgggccgagcgcaaacggacttttgaaaagaaatatatcaatagctagaaggcaaagtctcagcgggccgttccagccccaagccgggattccagcggttggctctgcttcttggttatcccataaacactacctgagggcttgagtttgcggactgggggagcgccccttatcgcgaaccgccgggaccataatcgaacaaaacgccaaggacccagccgcgtctacaccgcctgcgcgccatgcacttgtcccgcgcgcgggagagcaaacttcagggtcgttgccccaaagcgcatggggaaactggggccccgagcctgggagagcctttccagaggggggctctgctgctgtcccctctgcccttgtgccttcctggccctgggaggcccgtgcgccccagaacgtcccgacagctgcggaggccccgcttggcgagtgccagaaagaggcgcagggcgagggggtcccggtgaacaactccccccgcccggcgaatcccggcgggcggcctggggtgggcgccgctggcggtactcaccgcgcgcagtggagagggcgccccgacgcggtgcgggcgggcgggcgggccggtgcgggtccgacgaggccgggctgactgcggcgggcacgttgctgtctctgccgttgccgctgcctccgcctcctgggctgccgcggctgctgcctgcgccgggaggaccggccccttctcctccctgggccg

SEQ ID NO: 97346 - DNA, 13809 bp, Homo sapiens
atggggttttgccatgttggcctggctggtctcaaactcctgacctcaggtcatcctcccacctcagcctcccaaagtgctaggatttgagcccccgcgcccggccgagattttttaagacatagtaggacgtagaagtctgacttcattaccttgtaccagtcgtagctggatgttggaaaaccgtgtaaaagcacaactatctctggacttccaaccacacccacagagtctaggaagaaggaaagtacaatcaattatgccaaatccctataaaaataacctcgaagatgttaaaatctaagtaatctgatacaaagaacaagaaactgtgaccaaattgacattaaaatgacacaattatttgtaaaatgtaagcttaactgcgttaggtgagaacaggccttttctcctttcaatctgtatattaaaacattgtaaaaatcatgctatgtgaaaatacttgaaggcaccttgtttactttcacctaggtgtttttaaacagcatctccccatttctccttttgttctgtaatatgcaaattttttcagtgaaaagtaaattttcagttaaaagcatatgatcacaacacataaactacaaattctttgtactttatcatgaatggcctcacagaaattctctaagatacagcaactattcccaaggaacacctttagcttatgctgtttgctcagcactttttattcagcaggagacccaatctaacatcaaaaacataataaaactattacaaaatcctgtcaactataaaaagggcttaatcaacataaacatgaacttttttaatgcatatgacaatatggaagcattcagcatcatctaaattaggtaaacatttagacaatattaaccttgctaatagtatgggattagaacaggtatattcatatactgccagtgacatgaaaatttggtaataaggttttcaaaaataatttagaagcagttaaaaattgtatatactttagcctaagagttttgttcttgagaatctgtgcaaataaaatcattccatttatacaagtagtatagtttgaaaatgtaaggaaaaaataaactgtatggacatgaagcttttacttcaacattagttttttaaaacagtaaaactggaagtaacccaagccaacataataaaaattgtatacttacttaattgaatatagcaaatgagaggaggtcaggagcaataatgaaaaacggtttatgacaaacatttttcgttattgctcttgacccccgctcaaaacaaatcatttccaatctgtttctcagtttcttcacctataaaatgaggttaatggcacctatctccaaatgctgttgtaaagattaaacaatgaaggctgaaaacataactcagtgcctggcatatggtaattacttgataagtagtggtcataataatcatcatcactagcaaattaatttatataatggtatcaagacttaaatcacagttacactacaaataatctacagaaaaaatgaaatcagggatggtaaggagagagaaccaatggtggttatatctattaatattttatatattacctgacaggttgctcaaaaaaaaaaaaaaaaaaactaatattggaatacatatcaagctacaaagaaaacttatactaaaaggtaaggtctgcaggttggaatctcagtccctacccccattctcccagcagttttctgcgcttctctgcaagcacactacacagaaagagagagagatactctcctccatcattaaggagcaacaagagaccaatagccacaaaataaatacctcagctgggacttatgtgaccgatacacgcaggacttccaatagtccacttcttaccttggtagaagatacgcagtcccttgtaagtgaaaaacttgcctgaagacttccatgagtgaagggcaggggagagctgagggggtgggatgtgcaggtacgcagcaagcaggggcacggccagcagccccacctggacccaccactccctcatcctgtaggaaaagcagagacccactgtaagcagtcaggtaacattgtccactcatctacaaaccaaaacctggtaagatggggtgggagattgctgttaccatgcaatgattacattgcccttcacataggcacaaagctgaccgagactataatcaaacctctgtctgccatagcactcaccatatttgttcatcattctaatcttaaggaaaaaaaatacattatttcaacatataatcttctgcctctgctccccgactttaaccccttagcccctacccttgtggtcttcccaatacctgctgaagaggactttatataaataaaagggacatgacttaaatgctggacactctttcgttgacttttatcaaggcttcccaggaaaaaaataacttctttcttatttactccaaaagctctaccatctacccactacccccaaccagtaaaatgttcaaaaaatatatatgtgctatatctcatgttttaaagagtgtgtgtgtgtagtaacttatcacatgtcctcaagcagagagctactcctgattttcagccctcctgcctaaatgaagccccatttagtactcctttctggatttgggctgagaaactgctcagggtaaacagtctgtgaaagtaagatagctgcactgtgtattccaacataagcagctttgtcatgaccctgaatatctaatctcttgagaggtcaaggcggtagattacatttctgcttttcttagcagactctttaagtttccatttaatttcctaagatgctcccccacccccagataaggcataactcatacccagcgtgtgagaattgattttgtctttggaaaaagagcactggttggtacacccaaccctcccatgcccaggacttcaaaggcacaagtcagtttatccacattgacaaggagtgccaaacaggaattataaaccgttctgtttcaagtctatgacttctgatggtcaacagatcaagaattgtcagtagaatggaagttctctcaaaacagccagaatggaaataataccctccaaaactaaaattagagttgtcatagagctgaaataaattaattgctaaagccctgggggaaatggctttccgtctgtacacacattcttccctattgcctgtaatctacctacccgttcgctaacttcctcaacttacaagatacttttcccccccatatccctgatactttttgctaaaatctaaaaacaagcctgtggttttacagtggtaaaataaccatgtttcttaaacaatgtcagctccccaggctattttttaggcattattagggcagtcatttctttttttctccaaagtacctgtccataagacggatagaaccatttggtcctacttctcaaggtaatactagaaatggttcaaaaaagtgccagaacatgatggttatatcacagttttcacccaacaatagcaggctgtatcccagtatctccttgaaaggtcagatgacaaaaaccattaggttttgacgatcatttgcccagccctatctgtcctgtacttcaatgtatacattttcatgtgcagatttcattactcctttcccccagtgcttctcatcgcattcatccccggggttccagcagctgaatctctgcagtgactcagcagagagccccgggaggggcggccagagcggcaaatggggaggcttccccgccgctgctcagggaaagtggggggttaaaaaacgaggctatcgaccaacatactccactcctggacacccccctccacaccctcctcctcttactccaagaaagcaaagaggcaacctctcagggggccattttttgtcttattacctcagtaaaaatgcccccatgaacttttaggatttttagaagtgaagcaacctagccgtcagtaggcaaaatgggttaagcaaacattttttggccaaaatcccaactatttgatgagccatgagcggagacaataagcaaactccagtaacaaactttccagaaatttctgagccttgatttcttcatcttgtaaacagaaaaacacactcccgtaataataccacccaacctgccgcccacctgatggcgtcgccgcgagacgaaccactttgaaaacccgcgaaaccaaggtgaacaatccctgcgcaacatgacagtttggtcacatcgccgttctcactcgcgcttgttactgaaatctgaaaaatacttaaggcggctgacgggcactgcgagttctagtcactgcggtgactcccgccaccgtgatacctgggtcttgaaatcctaagctgcaccgcggcgatctcggcactgcgattatcccgttcttgaaatcctaaggtgcgccacggagacaccggggttctaaaaatcctacatcgcaccagggcgatgctggggcctatcctttaagtcgcaccagagcgatgctggggttctaaaaatcctacatcgcaccagggctttgccgggatctataaatcctaaatcgcgccacggcaacggcggagtctaagaatcctgaatcgcaccagagggaagccggagtctaaatatcctaaatcaaaccagggcgatgctgggggttagaaatcctaaatcatgctgcagcaatgactgagtataaaaatcctaaatcgcaccagggtgatgccaggatctaaaaatcccaattcgcatcagggtgagaccagggtcattatggatcctaagtcatatcaagatgacgctggggtccagaaatcctaaatctcaccacgacgatcccggggtctagaaatcctaacccaaggaggtcccgcgttctgaacattccattgcgggcaggagtgacaccccctcctcaagtaggcagagcgggcgcggaatgcgtgccgcctgtcggtagagttttcgcccagaggcagccccagctcggacacgggcacacagtcctccgctcgcctgcgccctagtcccagggccgccagccacaccccctcgttcccaccgcacactcacctgcggaggcgatctcggcgcaccatggccgcgttatcccatgccgcccgccgcagcgttgcagagcaccgggcgccgcagagcccgcagccgtgcagagctggccagcagcgggggcgcagcccgcagcccacagcccgcgcagggcggcgccgcgccgggcagctacagccactccggcgtgcgctgcggcactgcgcttgcgaggcgcagctgccgcagaggaggtgccggggtgtgctggttgccgcggcagcgcggagcgagtgggcaccgacttttagagcccacccgcgccccgcccctagcccgcccatcgccgcagaacccctaccgcctgctcccttgctcgccgcagagcccctcccagccgctctaccaccgccatggccacaaagatggggtgcccctctaacagtggctcctttagggggcaccttcaggggtgtcgagccccctccccaagaccccgctgctccctcgttaaccgccaaccctgagcccgagattctgctgcagaaaccctcccctgatgagttaaggccacgggcaaaaacagcagacccctgagtgccccaactctttccttagaccacccacaaaccccacaggccgcccacaaaccccacaggctgcccacaagccccacaggaggatggccgctcgaactaaggggcagcagggctctggggtgccggccgtggcgcctgctcccatccctcgttcgaagcgtgggtactgaaccgtgagaggtggcgagccacgagggccctatgcgccctaagcttaactaccggtaaccaccaagggcacgagcaagcggctagggagcaacaagctctgttggacccaccaccaagctagtaaacagattcatgggatggccactatggccaaagttgcacaaagtccggtttctcccgctccagccaccgccgctgcgcggggcaggtttcctttacagcagcgcgacgtggtcagcatgccagacgcctggccacagcagcgccctcgcagccccgctcgctgcatgcgccggtccgcgctgcacagaacagtgggcacaattaggagagcaaagccccctttatttacgtaagatagaatcacaatgcaagggcccagaggcacaagaaagagggaggaatttttctaatccataatcctttaaaaggcatcccttacgcctttgaaaagtgtagagtatcacgaagtgtctgtgttcattttctgaccgtaaactgaaatactggtgaacaaacstggggtgcgagcgggtgagcggggcggccrgccggtgcccgctgcatccagagggggcgctgcaggcctcccttcggctgcgcacggcccgggccctccgcggctctgcaactctgcaccccgaaaggttcggtgctggaccgcggggcatccaacccgggaccgggggcgacccacggacactgaggaaactaccgcctataagcctatcatcagaacctctggcacaacacaggtacacttctgcaggggtctggttgcccccagaaaaagcactcatgaaacaaatgctgatttagcacctacagggcactaagaaccgggggtgcgaaataaatgagaaatagccccggcccgaaaacaacacacgggccatctggaggggaagacagacaagaactgccactttgtaaaattttccttttaatttcctagcgacgtttgtggcagttgacccactcctccctaacgtgtaaggccctcagaggcagagcccaagtattattcaccttttgtagccccagagcccgccacggtgccggccacaaagctggcccctaataratactgcttgaatgagtacaagaatttgagggcgcacaggggaggaagtaattaaggggaggggcgaagggtggtcttgaatgatgaatagacatttaccagagagacaaagaacattccagccggaggggacggctttcgcaaagcaccggaggctcagggccgcgtgtttggggaaaacggkwagtcctttgagccggcaaaaaattaggatagcaagagaatttcatcgtagggaattaggaatttgttctagagaaaatgagaagccacagatggatttaaactctttatggccttaattggttacttaacaaaatttaaattagtctctttacaagtcaaagattacctattttaactaccactaccttttaaagactgaattactctgcaaaatctaaatcggttcttccaaaaaggtaaaggctttcctattttaataataacaataacaaaagcctttgcattatatatttttcatatttattgttaatggaaactttgagtcctacaaacaaattccacactttcattctcaccaggccagaaacaccagcatccaagatgaaggcaattttctgtttatggactgagtaccccacaaaagatcttattctgaaggccatggaacatgtctacccacatggatcaagtgggcagactggaggagaaacagtttaaaggccctgggggaaggagggagcgccagggagagctcctgaagacaacaggaattccaagtctggcactcgggagaaatcctcccttcagacattattgatgtctggccgaggagttaggaaaaacttccttgaaggagggattgaggttgagatgggcatggaacccagatcttaggcagagaaagcatattcctgtttggaagaaccctgagtacagaagtcagctcaaagatatcagcttggcccaaccaggaattcgctgtgggaagtctaagagagaaaatgctggccataatcccccaggagccaaagagttaacgaatcttctaaatgtgcctgatttacttccagaaaggagcttcctccgcagggggagaatttgacccaaggtataaaacacttggagccctgagaaaacacacagccacacataaattcaaagtcggctctggcttgctcgaagttgcaccctttcagttcctctggacagatgctatcctggactgtgcaggatatctcatgcagtagtactccctcagccagtggcttatcacacattcttgtcacattccaagtctaacacagttccgcctcatgataagacctcagatctgtgcaaaaattcatgtagaaagctctgcatttattatctcgctgattcacaacagtggtatgggatcagcagagatggtaccacagattcaagaaccatatttttctaaccccagtttgagacccataatatgacaagtgcaggatatttatggagacaacaagacacaaccgggactgccactttcaagagccatcattgtagattcaaatcaactaaaacacttcataatgggagaaacttggttgaacaggagcacatattaacgaaggggttttggttgagaaacttactgaatcagtaagacaggacccttaaaaaggctactgtgactgcagactgaggggaagtaccaaaaataagctaatcctactctattatgctggttagaactcacagaaagcattttattctgttctacagagcagatacatattgaaacagagacaaataggaatgtgttcagagaaggtcaactaaatgaattgcaaactgaaggtgtaacagttctcgtattttaagctcctaccatgagcatggatcttcacccaacatatccctgatcctcacagtagcctggctagatgagtattttcactcacagatttcagagagagatacggcagctcggaacgctaagtgttaggatgtgaaggggctgggaactgaacgcagatgtgcctggctccaaagttggccttctttccactactccacactgcctccctgtttgaaatagatgggcatgtttggtttgaagaaaagaagccttgtggagtaagtagaagaaggaaatgtgttagcagtcctcaaatatttgtggaagcagcattagacattttattctgtatggctccaatgagtgcaaattgtagagaaacagatgtcgattcaacataaagaattttccaacataggggctgtctagagggattgggtggctcagccattttggtatgggacaaattctctgtccactgggggctgggtaaccctgtggcaggtatgcgagctctgcatgtaagacaatgaatgacctgcaaggtcttttcccatctgatgtaaaataaggctccaagatgaactggaacttggccagggtgatcctctactgaggggacaaattcacagctcagtcttccctagttatgtccctcagcccagaacccttggtacaacatgctgctttgtactgagggcaaggcaaattgaagacattatcatcaataaaatcacatcgagcccgctctcaaccaaattaaccaatgtggccgggcgcagtggctcatgcctgtaatcccagcactttgaggctgaagcaggcggatcacttcaggtcaggagttcgagaccagcctggccaacatggtgaaaccccgtctctaccaaaaatacaaaaattagccatgtgtagtggtgtgtgcctgtagtcccagctacttgggaggctgaggcaggagaatagcttgagtcccggaggcagaagttgcagtgagatgagatggcgtcactgcactccagcctgggtgacagagcaagacttcatctcaaaaacaaaaccaaacaaaaacaaattaaccaatatatccctgaagctactggtgtgttcctcttcaggcccatttttgagtaaaagtgtttggctgtaaaaagctcaaaagatgagtggcagacgagggaagcagtggaactgaataatctcttacccaaataagatgaacctaaatgacagatggttgtttctccaggtgacagtattagtgggcacccctaaactatcttcacacaccctctgcattactccacacatcccattatcccacagctggtacttcttcaccaggtactcctgccccactatcccacacctagaggacattttatccactcaaacagataaataggctgaaggattctaattaagtaatagaatcttgcatttttatagctctttaccctttcacatatatcatctcatttgtcactcaccacagtcccctaaggaaaacagctactttctttcagacaggcaattttctagctgcctgggagctaggaggaggaaagggcttcagcacaggcacagtcgctctttctcgcttttttttttttttcctgttactaccttcccacattagattatgcctccagccagaatgagtcaaccaggagcaggtgcttccgttttcctcgattgctctcctcacctcacaccttcttcagctgtccccctccctgaaccaggcccccagccgcgccaccactgccgctctctgccctggtgaccccagcgcctggacctggaccgacacctgcagctccgacccggaacagccacgccctctaccactcggtcacacccgtgtgcctgcgacctttccaacctccaagcctggctgtcccacaagtaggaaggcgcagcctcccaagaaatcgagtccccacgcccaggagggcgggtggagccagctaacggaatgactaaactctgtcgcgggggtcaagcctcggcgagggttgtgtgacttttgtgttctctacgaccccgaggtgctgggaggcgacgaccgaggctctcgcccacgtggccctcttctggaccggcggcggcgcacctcgtatgggcacccacgcgccccgggagccctcccctcgccagcacagcctcacgcctcctgggccacgcgcacttacctgcccctaggactggtgtggcccacgcacacgagccacacccccaaggagggctagtcccactcctggagcgggctgcgagggtgcacggggaggctccactccttccccgcccgcctcttacctgattcaggtaagaccttgcctacaggactccatgtttcggagaaccggttgcgcatgcgcttcctgaggccagaggttctcggccttcaccctgttcccagggaggacccggccacgaatacgcggctcggggctagagcgtcgccaggtccgcgcacaagcccatcgcccccgagcccagcatgtgctgccgccttctccctgccaggcgtcagcgccacctattgcaaagggtatgaaatggcaggccgtggcttcgacaatagcctccggcattggataaagagaataaaattgtattcggcctgatctgagtacttttacataataaaagtgaaggccaaagaagtgacattttgatagttattaactacctagagatcttcggcgagccttccgtatttcagcccttcccctaatttcgcaattaccctaaagatggtgtccatcgccagccctctctctaccccgtgctctcgatccttatatttgctgctttctgctgttcacatggcgaacacaggcatcacatactcaacaagggccaggtgaaattcactaccctttctcacctcctctttcccacactacaaactgacccctgtcctaagaactgacgcttccttctctagtctgtatcttggttaacgcacttctgtccacccctgtctcccacacactgtcaccaacccctgtggaacagtggaatgagaccaaggggtcgggtacccttggatacagatcccaacaagttccctcctccccatccttttcatcttacctcccaagggtctcttgagttcagcttgctcccctccattcctaatgccatttgcccttgttcggggcattatttctcacctggactactgcctcctaattggcttccaagtctccaccatcacacatttctggtccatcattcacaaacctgccaaagtgatttttctaaaatgcaaatctgatcacatctctcttataaaactctttactgacaccctattgctggtgctaaattcaagctcttcagctccgcatgcaaaacacttcaaaatctggtccttgccttgacttcctctagaatcttctatcttaccacctccatcttacccacccccaccaaaacctcatgatctgaccaaacattactaattatagttcctcccaaaacaccatgcagtttcctttctccgtgcctttacacatgttctccaggaccagctatgtcctgtcccacttgggctacctaaaaaattcctcctcgttctttaaaaatcaatgtaattttcacatcctcttgcaagcctcccatgaaactttcctatggaaatgatccctccctcctctgtgctttctctgtccctctgttgccttatcacattgttttgtgatgatgtttgcagacctgtcttgtctctcctaccacagagctgagcttcttgaggacaaggacagcatcttactcatttctatgtcccttttgccaacccaacattttaattttctttttatagacaagagatctcaccctgtctcccaggctggagtgcagtggtgcgatcatagcttgctgcagcctcaaactcctgagctcaagaaatcctcctgcttcagcctctcaaatagctggtattacaggcatgcaccgtcatgcccagctcaacccaacattttataataatgatgataagaatgaataacagcaaatatttgttaatcgctttgtgccagactctgtgctgaatttctcatatgtacatttttaacttctgatgattaccctataaagaactattattatcctaattttactaatgagaaaacaggctttgaaagattaaggagcttgcccatggtcacagagctggtaaattgtggaatcaagatttaaatccagatctatctgctcatgtttatctattcatcagtttggtagaactaaaatatttgaaaaaccactagtcattttttaaagtattaatgcttacagagttaatttatcttttaaagggaaaacacatagctattctactctagtggatggaaatagagtgttctaatttaaactaatggtatagaaagccaaataaatactcttgatgtcaggctaaatgagaaaatgatcctacttttatcccatgtaatctgttcttattatatgaatgttacgagtatttttgcttagagattgatatattacaagccagtaatagatttttcttaaaaactccttttgaagaagagagatctaaattgaaagacaaccatagaatgtttaatgagttgtgagagatgaagataccaagatattgtgagggacgtgtgaggtctaaatgagttaatatgtgtaaagcacttggtggggtgcctggcacacaagaagcactgtattattgctgccgctgttcttattaagaacttcaagtagcttgcaatccagtggtagagataaacgcataagctgacaacaagtaatgtgataaatgatgtaatttagctatgatcaaaattctgtgggcattccaaggggacagggtctgccagggaatagggagagtggcaggaaaacaagatggcacccagagatcccacagctgcagagtgagcacattgctagaactagagcaacgcaacctttttcagaaacactttatttgttggtaaatcttttactactaaaggctttacttcttagaatccacaatgtttaaagtttccacagtttcaagcactcctttgcctctggtggttgggggaagggggccactgggcagaagggcaaggctttcaccaagatgatatgagaatggg

SEQ ID NO: 97347 - DNA, 45198 bp, Homo sapiens
ccctggtgactccggggctcccagcttgccctctgcctactggggtgtgccaccaggcagctggggaaccctcacactgggcacctcctcccactgtttaccttcttctccttcctgctcctgcctgcctcaacctaccgtgggccaggctttattctccccacttctccggtggggaagctgaggcccagggagggcagggggctcactgagggtcaaacagcaggcgagttgatgcctaggtttggcactcctgcccgacaccctggtggcttgcggaggtcagcctgggaacaccctggggtggtgtgtgggtgggggctgggtcctcaacccaggcctgcctcttgctcccggcctcactgccgtctccccctccccacctgtctttattctctttgcagcagaagaccccctgctgcgcccagccggcccaccattatccgcccagccgagccatccctgctcgactaggcctcgaggggggcgtgctctcgggggggcctcacgcacccgcggcgcaggagcttcagtggtctggggccctccgccgcccctatgctgggaccaggctcccagtgggcagccctggcctcttccttaacgctggccccggtccagggccggcccctgtgcctggctggacaccgcactgcgcaaaggggccctggagctccaggcagggggcgctggggtgttgcactttgggggatggagtctcagggtggcagaggggggaccagaacccttgacaccatcctgaatgaggggtccagcctgggggggactctaccaaggtcttcttgggctgggaaagcccatgtagggcaggccttctataagtgcgggcaccaagggcgcctacatccccaggccttgctggggtgcaggggtatatcaacttcccattagcaggagctccccagcggcaagcctggcccagtgggctcggtagtgcccagctggcaggcctgaggtgtacatagtccttcccggccatattaaccacacagcctgagcctggcccagcctcggctgccagaggtgcctttgctaggcccggagccgttggcccgggccggccttgccctattcctctcctcctcctcctcctgggtcccccagggtggctgggcttgggctatgtgggtggtggtggcggggggtcttgggggcctctcagctcccgcccatgcctccctgatgggtgggcccagggcggcctctctctgaggagacctcacccactcctcgctcagtttgaccactgtaagtgcctgcactctgtattctattaataaactaaaataaagggaagacgctgctggtggctgctgtgtgggcctcttgtgttagtgttcaggctggggacatgggtgccacctccatcaggcctcccataaggatgcccaagtccctgcactcataagtgcctcccatctccctgagggctctgctttcgggggtgtcacctttcagaggaagccactcgatacaggggagagcttttactttccttagcatgtgaggagtgggagcagatattctctgaccccctgcacacccccacgtgcacaggcctggctgctgcctggtgaagcggggaccccagcgctccacccccttcctaccctcaggccctgcttctctcacctcgtggggaagcccaagcctcgtggcccaactggggctcagttaaactttgctttctgatttttctcttgtgccaggcgaccacctccatcggctcccgcacgacctttcttctgagcttcgtgggaggcccctcccacctgtctggctgccccctcgggggccggtctgtcctggctggtgtccctgagccccaatcagcaggctcttgtgattttctgaccataatttattgactccaatgcccaggccacaccaccctttgttataggaggcttctgcctagactttggccgggccatccctcatgcctgtgtggggcccctgcaggagaggggccggggcaggtggtcttccaggcccccttcctggcattctgttaccagacctcaacctggcttggagggcccaggtttccttgttaggccctgccccgcaccaggcaacgctaacacaggatgggaggcttaggctaaggcacatttacagtagaggggccaggaaatccgaggctcacgttccaacgctgcagtgcccaccatgtgagatttccaggaccgtcggtgcagccactgagccgtcccttctacaagccagaggtgttccctgcccgctgaggacggaaggagactcatggggccagaccgcaggccctgactgcacactcccgttttggcaggaaactaaaattggggagggacccccaagtctcatatgcacacaccctgctgcccctcctttgtcccgttcttccttccatggcaggggctacgtgggcaccgggcgcttgtcctggaagaagcgcttgagcgtgcagacctgcagcacagccaccagcagcagcaccgccacgttgacagctgaccagaagttgacccgctccaagttgccctcttgcaggttgcggtcacgtgcctcgaaggcccgcagtagcgtgagcatctggatgctgcgctccagccgggtccgcatggtctcaatggactcctacagggcagcgggaggggaagggtcaggcctccctccacccatcagggagcagagaccaaaaaaaccgggggatacggagggaggctgtattaaccctgggaggtacagctgcaaacacagacttgttcaggctaagttcaaatcctcaccctgccactcactggctgtgaccatgagcaacttaattaacctatctgagcctgtttcctcttctataagcttccaaattgctgtgaacatttaatgcctaaataaatgtacaaggatgagcatggtggctcatgcctataatcctagcactttggaaggctgaggtgggaggatcgcttgagcccaggagtttgagaccagcctgggctacatggcaaaaccccatctctacaaaaaattagccaggggtggtgatgtgcaactgcaatcccagctactcaggaggctgaagcaagattacacctgtaatccaaacacaggaggatcacttaaacccaggagttcaagaccaccctagccaacatggtgaaacctcgtctctacagaaaacaaaaaattaggcatggtggtgcacacccgtagtcccactgaggtggcaggattgcttgagcccaggagtttgaggctgcaatgggctatgatcacaccactgcactccagcctgagtgacacagcaagaccttgcctcgccgtagctcacacctgtaatcccagagctttgggaagccaaggcagacagatcccctgaggtcaggagttcgagaccagcctggccaacatggtgaaaccctgtctctactaaaaatacaaaaattagtcagtcaggcgtggtggcacagctattcaggaggctgaggcaggagaattggctgaacctgggaggcagaggttgcagtgagctgagatcgtgccactgcaatccagcctgggtgaccaagagagatctgttagaaaataaataaataagtagttaattaaaatactaataaatgtacagaacatatttgcttgtggttaagagcatagttgctgaaaccagcatgggttcaataccaactctgctagttggtctgtgtggccgtgagttgctcagccatcttgtatctcactttctccacctgtaaaatggggatgacttgagcacagggtctgcttcacaaggtggtttggagatttacggtatgagttatttatgatatgagttccttaaacctttacaccagggtttatacctagaaatgaactacttttttttttttttttttttttgagacggagttttgctcttattgcccaggctggagtgcaatggtgcgatctcggctcactgcaacctctgcctcccaggttcaacttccacctcctgggttcaagtcattctctggcctcagcctcctgagtagctgggataacagacgcccgccaccacacccggctaatttttgtatttttagtagagacggggtttcaccatgttggccaggctggtctcaaaactcctgacctcaggtgatccacccgcctcagcctcccaaagtgctgggattacaggcgtgagccaccgtgcccggcctgaaatgaactacttattttaagagctgctactcttactataattcagttggagggcacaactacggaggggaggctgggtcagcccaaggggggcaccccaggtgaatcctagagatctggaaggagtggccccagcgcagcctggacacaccttgatgtcctccattttaacatccagcatctcctcgggctccacagcctctgcccatccttcgacctcctcgtcatcctggaggctgtcaaagatcagttcaaagaacaccagcttctcggagatggtgctgaaggagttgtcaaagcacagcttgtagtccccggcctccgttggctccaccctgggcagacagacacacagacatgacccagggtggccagccagccgactcagcggggcagtcagggcggtaacctgaggccgcctgggaagggcagggctgtaactgaacccaggcaggcatcaagactgaactcacgtgtgtaccccatcagccttgcgggactcgctgaccaacagcacgccctgagggctctccagcgtgaagtccacgtccagtccagcacctccgatcacctggggggcaggtaagagcgggtggagggctagcggtaggccaagggcgcctgccgaagagggctacggctgaaccaacactgatcaatacagaccaccaagggcttacctgaacggcggcacacccacacccgccccaacctgtcccagtggctgcgccccttgcctccaccctcattgatatgacagcttggggtccatactttcagctgaccacgcacctaccaaaagtacttaatggacgtttacctgaccacgcccctggttggctccgcctccgaaagaggataggcccagcctttttccttagtctaacccccgagaaaggcctgtgtgggcaacgcccccgcagttgacctatcagcactatcgccacgcccaccagccagagtcctgtcctctcagaggctccctatacttatcgatggccccgccccctctggatctcttactctagccccgcctgcttcattactccctccccttccgctcccacacaccgtccccgccccatctgtccatctctttctagctccgcccccgcgctcccaagcacggattcctcccccttcctcctaaagcgcgcctcgcctcgaccgcttggccacgccccctctccctgactctgctggccgcccagcccgcgaccctctacctggtattcggtctcgaggcttgcgttggccggcgcggactggtagaaacactgcttcctccccgccggcaacaggaacgtgaactcaccgtcctggattggcgggggccccgcccctcccacctccactggtggcattagtagccacaaggccagggctagggccgcgccggccgccatcatccgggtcaccctctggtctgcaaaggggtcgcggctcctttaagcgctagccctgccccggtgctactcggcggagctcattggcagtggcttctgtatgttgtccgtaaccagaggtgccaggagtgaaggacccccccactagagggcaggcggcccgaatgaatgcctgatgtgcccagaaacactcaaccgtctgggaatatttttctcaaaggcttcggctctcttctcggccgctggtggaggaaaattacaaaaataagtgccatgatggcgcatcttttgtaggcagtagctaagacaactaaagttacaggcggcagggtcctttttagtcacctccacgtggttttcccagagtgcgccgcgcgtgacaacctttggcgggaccgacgtggtggagtggacccaaaaatagcgtctaggcgtggccctgtacgcgacccgtagggctcgcctataaaagggctggggcggggcggagatacctgtggcgtcgtgttttgcttgctctgtgagcgtggtccaggttcgacgccttttgcgccttagaggcatcagcgtatcagtttcctcgtaagtcgggagtgatggaacgaccaccctgtagtgcggctgtgagaattgagatgaggcttggttcatattgagygctcagctttcctggcttatagacagtggaggggcgtggccccaccatgcaccccaagggtctcagactcaagggccagcaggtaaatagagccattacagtagcctcgggtcagaaaaacgacagcccaggtaggaagagataaggacagtgtgggactgggagccacgttgcctggttcagctcctgccccacccattacttgaggcattccctctgttgagcctcagtttcctcttctgcaaaatggggataataggcctacgctactgggctgtctttaggatacgtgaaatgcttgttgagtgcttgcttccgcagtgcgtgggacatcacaggccctcagtaaataataatctgttatttggttcccgtctaaacataaactgtgtacagggagatgtttagtcttcaaagataaacccggaaaaggttggcaggtgatgacaaagatccctcaaatacagctggctgttgtcagcactttcctgcatttggagaatttggggaagtagctctttgtaatatcagtttggtattccttttcactccaactttttctatcatttacactcactgcttggacaatttgaagtaacagtggagaacgggtgactccttttcttttttttctttttttttttaatttttttttcctttttttttttttttttttttgagacagagtctccctctgttgcccaggctagagtgcagtggcgcgatctcgactcactgcaacctccgtctcctggggttccagcgatcctcctgcctcagccttccgagtagctgagactacaggcacgtgccaccacacctggctaattttttgtatttttagtagagagggggtttcaccatgttagccaggatggtctcgatatcctgaccttctgttccatccacctcggcctcccaaagtgctgggattgtaggcgtgagccactgcacccggccggattttttttaggacagggtcttgctctgttgcccaggctggggtgcagtgacgccatcatggctcactgcaatctctacctcctgggctcaagtgattctcccacctcagcctcctgagtagctgggactacaggtgtacacctccatgcctaactaattttttgtagacatgaggtttccctgtgttgcccaggctggtttcaaactcctgggctcaagccatctgcctgctccctcaccctcccaaagtgttgggattactaaaattgatttttttaaatacagtaaaattcacattgcataaaattaacaattttaaggccgggtgtggtggcttacacctgtaatcccaacacttttggaggccaaggcaggcggatcatgaggtcaggagatcgagactatcctggctaacacagtgaaaccccgtctctaccaaaaatacaaaaaattagccaggcgtggtggcgggtgcctgtagtcccagctactctggaggctgaggcaggagaatggtgtgaacctgggaagcggagcttgcagtgagcccagatgatgccactgcactccagcctgggcgacagagcaggactccgtgtcaaaaagaaaataaaaataaccmttttaaaattaacaattcagtggcatttagtacattccagtgttgtgcagtgacttctatgtagttccaaaacattttcatcggctcagtaaagatccctgtacccattaagcagtgattctgaaacggcctcgttgtcttgagtaacacccggggtcgttgtctcacagccacgaagaacaaggaccaggacacacaaaagaatgaggttgagaacgaacgtttaataggcaacggagagtatagctctctgctacagagaggagtcccagaaaaatgggttgctggtccatagcaaaatacaggggggtttatagatgagctggtgaggagacttagcctgatttacataggggatgaaaaactggttagaacaggtgtgccatttgcatagggtgtgaatttctggtatctgctaatcttttattatgcagccggggtctctacctgagctgtgccacatcgcccatttctttttctttttttttcttttttttttttgagacagagtcttgccctgtcacccaggctggagtgcagtggcgtgacctaggctctccgcaacctccgcctcccaggttcaagggattctcccgcctcagtagctgggattacaggtgcctgccaccacgcccaactaattttttgtatttttagtagagacaggatttcaccatgttgtccaggctgatcttgaactcctgacctcatgatccgcccaccttggcctcccaaagtgctgggattactggtgtgagccaccttgaccagccccatgttgcccatttcttagttcctgtacacgtggtagcaaaaaaggggagatggagcctccgtgttggatatgcctggctcccaggtagccattttctgttggtgcagctgccagcattcccacgtgcaagcttccagcttccttatctatgtttgcagcttgagttttcaggctgctatttattagaaaagaaatgatatcaggggctactttctgttagaaaagaaattctgctgaggactctttgccctcactgcctgcctaaatactttctatctcctgtatcaactcctcattacactttgccccccgcctctcaactagctatgtgctttttgcctctagggatttacctactctggatatttcatatgaatagaagcagacaatgtgtcaccatttgtattgaacttcttttacttagcatgtttctagggttagaccatgtatcaatatttaattcctttttatggctgagtagtattctattgtatgtacataccacaatcaatttttcttttgttctttttttttttttttttgagacagtctcgctgtgttactcaagctggagtgcagtggtgtgatcacagctcaccgcaccctccacttcccgaactcatgtgatccacctcagcctcccaagtagctgggactacaggtgcacgccaccacacctggctaattatttttctgtggagacaagaggtctccctgtgttacccagactggtctttaactcctgggcttaagtgattctcctgcctcagtgcccaaagcgctgagattacagttgtgagtcactgtgcctggccccacaatttctttagccattcattattgagggacagtagagttatttcaaccttttagctattgtgagtacagctgctgttaacatgtatgtatgtgtattttattacttgcgttcagttctttggggtatagatctcgtggtggaattgctggatcctatggtatttctatgtttaactttttgaggaacaaccaaagtgttttccacagtggctgtactgttttccattcccaccaaccacgtatgagggttccagtttctctacatcctcaccaacacttgttactttgcattttgttttttgttttgttttgtttttgagacagtctcactccttcactttggctggagtgcagtaactgcaatctccatctcccaagttcaagtaattctcctgcctcagcctcccaagtagctgggattacaggcacatgccaacacacccagctaatttttgtrattataataaagacagatttttgtttttgtttttgtttttgttttgttttgttttgagacggagtcttgctgtattgccaggctggagtacagtggtaccatcttggctcacttcaacctctgcctcccaggttcaagtgattcttctgcctcagcctcctgagtaggtgggactatgggcgcatgccaccatgcccagctaatttttgtatttttagtagagacgtggtttcaccatgttggccaggatggtctcaatctcttgacctcgtgatctgcctgcctcagcctcccaaagttctgggattacaggcgtaagccaccgcgcccagcctagagacaggtttttgccatgttgaccaagctggtctcgaactcctgacctcaagtgatctgcccacctcggcctcctaaagtgctgggattacaggcgtgggccactgtgaccggccctgttttgtattttttgtttgtttgtttgtttgtttattatagccaacctagtgtatgtgcatttcccaaatgattagtaaggttgagcatcttcttatctgcttctcggtggtgtgtatatcttctttggaaaggtatccattcatgtcttttgcccatttaaaaattgggttgttcatctttttgttgtaggaggttttttaaacacatattatagagaggaaaagatagaaaagtgaaacaaaaaaacttctctagctggaccctcatgcttgtaatcccagcactttggaaggctgaagccagaggatctcttgagccaaggagtttgagaccagccttggcaacgtagagagactctcccgctcctaccaccatctttacaaaataataaaatattagccagttgtggtggcatgcacctatagtcctagctactcaggaggcagaggtgggaggctcgcttgagcccaggagttcaaggctgcagtgagccatgattggcccactacactccagcctgggtgacagtgagaccctgtctcataaacacacacaaaaaaataccctctcgcggccgggcacagtggctcacgcctgtaatcccagcactttgggaggccgaggtgggtagatcacaaggtcaggagatcgagaccatgtcccttgagtaaacaaaaccaaaaactctcctccctaattattcaccaaatatttactgagcctctgacagtgaataaaacagacactgtcaaagccaggtggagtggctcacgcctgtaatcccagcattttgggcggccaagttgggaggatctcttgagcccaggagttcccgactagcctgggcagcatagtgagatcccatctccacaaaaacattttttaaaaaattagctgggcatgggaacaatcccatttcctgagggaatgggaggatctgtctacttttcttatcctgattcaaatggaatgccagtgtggcaactcctaggatttgtcacgaatgggaagccaagtgccatcttcaaaatttcaggtcttaaatctggagaaggaagccaacatccttttggagccatgaatattgtccgaactccatctgttgctcagattggaatttcagtggaattattggacagtatggctcagcagactcccgtaggtaatgctgctgtatcctcagttgactcattcactcaggcccagatgacaccaagcccatctgaaatgttcattccggcaaatgtggttctgaaatggtatgaaaactttcagtgatgactaccacagaaccatctcttggaaaacataatttgaataaaatacttttttttttttttgagacggagtctcactctgtcacccaggctggagtgcagtggcgcgaccttggctcactgcaagctccgcctcccgggttcacrccattctcctgcctcagcctcccgagtagctgggactacaggtgcccgccaccatgcctggctaattttttgtatttttagtagagatgggttttcaccgtgttagtcaggatggtcttgttctcctgacctcgtgatccgtcggccttggcctcccaaagtgctgggattacaggcgtgagccactgcgcctggctaaaataatttttaatggaaaaaaaaaaagtagctgggcatggtggcacacgcctgtagtcccagcaacacaggaacctgactcaggaggatcgcttgagcccaggaggttgaggctgcagtgagccatgattgcactactgcactccaacctgtgcaacagagagagaccctgtctcaaaaaaaaaaaccagaattccaggttgtagattccttcaccatattgactcaggatttttcttagccactttgccagccggggacatctatggccggcagtgccccctaccacccgcaagggcatgacactggaggcaccctgcccactcagcccacctgtgttatagcttgtatctgcattcggcagttytcaagctcttgtcctgcatccaagaagaatgaggaaatgctgacaattgaagggtgaagatgggaggagaatttttttgagcgacagaacagctctcagcaaagaggagatgtgggggtgtggtttatctttcagtgtggctggatccggggctttttatggactcagaatggggaatgtgtgctgattggattgtgagtgtgcaaaaaaggttaaagcgaagacaccactcaaaggtgggtccaacagtatagaaaaccaattaggaaagggtaggtatatgcaaactaggtggagggtggggatcaatctgaggaaagcacgccaaatagaagacagattctctgtccagtccctggatttgacttgtagctttgctttcaggctttaaactgtctttggcttggaggtggggtttcaccagggacctgcccctatctgcctaggcatttgtctgcctcttgccactatcaawatcaatcagaaggcttccctgaccctgctgtagctgggttgagccccctcggccactgcctctgttactgcacttcaccactggactctccttgtcttcttgtctgactcttgaacgctgagctccttgaggacaggagccattttcattcatcctaatgtctctggcacaattctgggaacatgatgatgctcagtactcagttggtggaaaaaataagccaggaatctctcttaactccatctcctgtacacccagtatacagccacagaagtggcttgaatggatgttttttttcgctgtcaggtcagatgattgagaaatatttatgatgtgccaagcatggtgggagacacgggacactgcaggtaacaacacagaccccatccttgtgctccgagaggaggaggaaagctgtgttaagatatcatgaaggctgggcatggcggctcatgcctataattccaacacttcgggaggtgggcggatcattcgaggtcaggagttcaaaaccagattggccaacatggtgaaatcctgtctctactaaaaatccaaaaattagccagccgtagtggtgcatgcctgtaatcccagctactcaggaggctgaggcaggagaatcacttaaacccggaagatggaggttgcagtgcagccgagattgcgccactgcactccagccggggcgacaaagtgagaccatgtctaaaaaaaaaaaaggctggacacggtggctcacgcctgtaatcccagcactttgggaggctgaggtgggtagattacgaggtcaggagttcaagaccagcctgaccaacatggtgaaaccctgtctctactaaaaatacaaaaattagccaggcatggtggcrcacgtgtaatccccgctactcaggaagctgaggcaggagaatcgcttgaacccaggaggtggagtttgcagtgagatgagatcgcaccacttcactccagcctgggtaacagagtgagactccgtctcaaaaaaaaaaaaaaaaaaatttaaaaagctaggcgtggtggctcacgcctgtaaccccagcactttgggaggccaaggtgggaggattgcttgagctcaggagttcatgaccagcctgagcaacatagcaagaccctgtctctgtttaaaaaaaaaaaagaaaggccgggtgcagtggctcacgcctgtaatcccagcactttgggaggctgaggcgggcagatcacaaggtcaggtgatcaagaccatcctggctaacacagtgaaatcccgtctctactaaaaaatacaaaaaattagccgggcgtggtggcggttgcctgtagtcccagctactcgggagactgaggcaggagaatggcgtgaacccaggaggtggagcttgcagtgagccgagattgcgccactgcactccagcctgggcgacagagcgagattccatctcaaaaaaaaaaaaaaaaatgaaggaggctgggcgtggtggtggcttacgcctgtaatcccagcactttgggagcccaaggtgggaggattacttgagcccaggagtttgagaccagctaggcaatgtagtgagaccctttctctamaaaaaaaaaaaaaaaatttagccaggtgccgtgcatgcctgtggtcccagctacttggaaggctgaggtgggaggatcacttgagcctgagagatggagactgcagtgagccatgattataccactgcactccagcagcctgggcaagaaagcaagaccttgtctccaaaaaaaaaaaaaggcatgaggatgaattcaataaattcaagaatattctgtgtactaccttgaccaaattgtattaatatttagagamtattataccaaacaactacaccgtgtacttgaatttctagcgtacgtacaatgtggatcgagataccctgcaccattctaaaaagtcagtacatttcaaagtattgaaattatatgaccacaaaggagttaaaaatcattaacagtaagctgccccccaaaaagcccaagtacttgggcattaagcaacacacatattctctggatcatagaaaagaaagcacaatggaaataagcaaatatttctaacttaatgacgctcaatatatgaaaatgtgtggcatgcagttaaaacagttcttggagggaaaggtgtacctttaaatgcttgtattagaagataaaggtgggccgggtgcggtggctcacgcctgtaatcccagcactttgggaggccgaggcaggtggatcatgaggtcaggagatcgagaccatcctggctaacatggtgaaaccccatctccactaaaaatacaaaaaattagccatgcatggtggtgggtgcctgtagtcccagctactcaggagtctgaggcaggagaatggcgtgaacctgggaggcagagcttgcagtgagccgagatcacgccattgcactccagcctgggcgacagagcaagactccgtcaaaaaaaaaaaaaaaaaagagggtttaaagttaatgagctgcctgtaatcccagcactttgggaggctgagtcaggaggattgcttgagcccaggagttcaagatcaggctgggtaacataataggaccctgtctctacaatttttttttttttaattagccaggtgtggtggtggacacctgtagtcccagctactcaggaggctgagatgggatgatctcttgagcccagcagggtgaggctgcagtgagtcatgatcatgctgcttcactgtagcctgagcaatagagcaagaccctgtctcaaaaaaaaaatgtttttttgttgttttttttttgagacagagtctcgctctgttgcccaggctggagtgcagtggcatgatctcagctcactgcaagctctccttcccgggttcacgccattctccagcctcagcctcccgagtagctgggactacaggcacccactaccacatctggctaattaaaaaaaawttttttttaataaaaagagtttatataagcatccatcttaagaagctattaatacaaatttctgctggtgaagtttaaatttaaaaacaaaacatgagctaggaaaagaagagccaattgaacataaggtaaccagaaaaaagaaaagaataaagtcaagtcaaaaggcaataaaatagaaaataaaacaacaaatccaaactgtggcactttgaaaagatcaataacaatgattagctcctaggaagaccgataagagacaaggagacttcactaatttatgtgtcaggaatgaaagaaggaacatcactacagaccctacagacattaaaaggatagtaaggggatataaataactttacaccaatacatttgacaactctgatgaaatgagcaaattccttgaagatacaagcatgccaattgcaataaaggaatattacagggcactgtgggagaatttagctaggggattgttctaagtccagaggggcctggaaagttttcccagaagtgctatttaaactgagacctgaaggagaagcaggatttgaccaggttgacagaattgtgttccaggccagggaaatagtgtgtgcaaaggccctgaggttggattgaactttctgtgtccaaagaaaaaagtttactctaatgacgcattttggtgtttgatgaccacrtgccacatccttcttgggtccaaacccccaagcaaacctgactggcttgaacagaaatgtttaaaaagataaatgcaaacccagtagtaagagaaacttggaagtttctgggctgtaaacaggaggcagtttatcctgtgaactatatcacaaactatatccagaattgatctggaactggtattccctttcatgtggctgatcaaacttctgagtctttttcctccctgtaactttaccttgtgagcatgcactacccactaggcgttgcatttcctactacaagttctttgaatctaatgtccactgctctttttttttttttttttttttgagatggaatttcactcttgttgcccaggctggagtgcaatggcgcgatctcaactcaccacaatctccatctcctgggttcaagtgattctcctgcctcagcctcccgagtagctgggattacaggcgtgtgccaccacgcccggctaattttttgtatatagtagagacggggtttcaccacgttggcctggtctcgaactcctgacctcaggtgatctgcccacctcagcctcccaaagtgctgggattacaggcgtgagccaccacgtctggcctaatgtctactactcttagccccattctgcagagcagtatactgaagcctcaaaggaggtaagccatgcctgaggtcacagaggccaagccctaaccaccatgtcctcccactcctgcccatatttgtttaaatgttggtgctggttaggctatggtttgtgtcttgggcatgggtttccaaacatcccactgctgtcaccctgtctcattcccaggagttctcttagaaggagagacaaaaggctgggcacggtggctcacgcctgaaatcccagcactttgggaggctggggcgggcagataatgaggtcaagagatcgagaccatcctggccaacacagcaaaaccccgtctctactaaaaatacaaaaattagctgtgcatgatggctcctgcctgtagtcccagctactcaggaggctgaggcaggagaatcactcgaacctgggaggtggaggctgcagtgagccgagatcgctccactgcactccagcctgggcaacagagcaagactctgtctcaaaaaataaaaataaaaaaagaggaaaaaattgtgaaaaccacctaaacatctcatccatttttttcccctctaatctgcagaaccgcaaccagagaggtgcgcgggtctgatgtgtgtttggggaaggggtggggaggggagagagtccctttcagtgcccaagcctgtgtgtgcaacttcctgccagtgaggaaactctcagctcgagaatcagccctggttctcctttccccgatctggcctcacaggaggagttggcggggagccttgggcccctctggcctcagccggatttcccagccaaacgcagagagagatgccctggaccatcttgctctttgcagctggtgagtctgaagcccccctctcagatcccccacgcctttccccccatcctctgtccaccttgccgctccaggggcagaaaccagtgcaggggctgccgttctcagggcatcgaggaggctgagcccttggcagatgggttttccccctgagccttggaaactctccagtagtgttggttttttcttcttaggctcctcatcacccccaagtttatgaatatcagaaatatcacccctctggagtcagctgtgcccacaccccatgattcagccccgcttcgtctctgaaggctccttgagtgctggggcagcaggagggtctacctagggggatatcagtgtggcaggggtgggtgggggttggaggctggacgagggagggtttgtatagacctcacctggccagacactctgctcagaagcctgtgggcaatcaggagagagatggatccccaggagaccatcctgcaggaagccgtgctccaaaatccgtattcttcacccaagcctgggaaaggagataaaagtcctctgcccttccttctcctgccctccctctcactcaccccctccccttcctgccacccacctcactcaccccctccctcctgccatgatggcctccttgctgctccttttttaatatttatttttatttttaaatagagacagggtctcactgtgttctccaggctagtctcaaattcctgggctcaagcagtcctcccaccttggcctcccaaagtgctgggattacaggcgtgagccactgcatcaggtgtttgctcctccttaaacacccccattccccttccatcccctggacctttgcctatgctgttccctctgttggaatgcccttccccagctctccaaatgggtccttcctcaccactcaggactcagctcgtgggaggccaaggtgggaggatcacttgaggtgaggatctgggcaacatagtgagatcccatctctacacaaaataagcaaaattagctagccaggttcaccagcctggccaacatggtgaaaccccgtctctactaaaaatataaaaattagccaggcatggtggcacatagtcccaggtactcaggaggctgaggccactgtactccagcctgggcgacaaagcaagattttgtctctaaataaataaataaagtaataataaattaaataaaaaataagagtatagttgtgttgctatgtaataaccaatgctattattgaaaactgatggccaggcatggtagctcacgcctataatcccagcactttgggaggccgaggtggggggagtcacacgaggccaggagttcgagaccagtctggccaatatagtgaaaccccatctctactaaaaatataaaaattggccaggcatagtgccacatgcctgtaatcctagctacttgggaggctggagaatcacttgaacccgggaggtggaggctgtagtgagccgagatcacaccactacattccatcctgggtggcagagtgagactccgactcacaaaaaaaagaaaaaagaaaagtaattcaactacagggagccgtcaccatgtgccaggcagtgtggggtagggtcactagcctcctgactcacagaaaacacaaggctgagggagggtggtctacttgcccgaggccacatagccagggcagcctccactctcaccacgcacccacccaccttaccctctgcattgcaggctccttggcgatcccagcaccatccatccggctggtgcccccgtacccaagcagccaagaggaccccatccacatcgcatgcatggccsctgggaacttcccgggggcgaatttcacactgtatcgaggggggcaggtggtccagctcctgcaggcccccacggaccagcgcggggtgacatttaacctgagyggcrgcagcagcaaggctccagggggacccttccactgccagtatggagtgttaggtgagctcaaccagtcccagctgtcagacctcagcgagccygtgaacgtctccttcccaggtaaggcccttctatgggatctcactgccrggggcttaattttctcacatggacctcttgtgtgtactgttgactcagaggccttcccagaaaaagccaggcttacaccctgccaggacttactcgcctttcctttttcaatcttctcagccagcccaaaaggggatttgttggttcactgagcttaagtcagctcacagggccgacttcaggtatggctagatccaggtgctgaaagctgtcagggaccatttgccccatctctgctccacattcttctccgtcttattgtcaggcagcccgtctccctcttggtgccaaaattggtgctgtgattcttcccattttgcagataaggaaactgaggcacaggaggtacacaccttgtacacaggtaacaggtagccagtctgggatgccattgccttccaaaaaccatgaattacacctccgtgacatacattacttcccctcttggccacatactttttttgtttgtttgctttgagatagttatgctcttgttgcccaggctggagtgcagtggcacgatcttggctcactgcagcctctgcctcctggttcaagcgattcttctgcctcagcctcctgagtatctgggattacaggtgtgtgccaccatgcccggctaatttttgtatttttagtaaagacaggatttcaccatgttggccaggccagtctcgaacccctgacctcatgatccgcctacctcagcctcccaaagtgctggaattacaggcatgagccactgcacctggcttttttttttttttaaatgagacaaggtcgtgcagactagagggcaatggcacaatcatagctcacttcatcctccaattcctatcctcaagtgatcctcccacctcagcctcctaagtagctgagactacaggtgtgcaccaccatgcccagctaatttaaaaaattattttagagatgagggtctaaaatgttgaccagggccggacatggtagctcatgcttgtaatcccagtactttgggaagctgaggtaggtggatcacctgaggtcagagcttaagaccagcctggccaacatggtgaaaccctatgtctattaaaaatacaaaaaataggctgggcgtggtggctcacgcctgtaatcccagcactttgggaggccgaggcgggtggatcatgaggtcaggagattgagaccatcctggctaacaaggtgaaaccccgtctctactaaaaatacaaaaaattagccgggcgcggtggcgggcacctgtagtcccagctactcgggaggctgaggcaggagaatggcgtgaacccgggaagcagagcttgcagtgagccgagattgcgccactgcagtccgcagtccggcctgggcgacagagcgagactccgtctcaaaaaaaaaaaaaaaaaaaatacaaaaaatagctgggtgtggtggcatgcgtgtgtaatcccagctactcaggaggctgaggcaggaggatcatttgaatctgggaggcggaggttacagtgagccaagacagtgccattgcactccagcatgggtgacagagcaagattctgtctcaaaaaaaaaaaagatattgaccaggctagtcttgaactcttaacctcaagtgatcctcccacctcggcctccagagtagctgggattacagatgtgagtcaccatgcccagcatgagccacataaggtttctgagcacttactatggaccaagaactgtctttgggcttgcccaaagacattccaggctgacattccaggcggatgaggacagatgataaacatgaaatccaatatatattcaacctgccagcagggcaccagatgaaatccacctgggtgaggatgtcattatttgaagtagagtagggcgactggccccatgttctaatggtcagccctctggactctgaagtagagtagggcaatcagggaagccctctctgaggaggtggcatttgagcaaaaaactgaatgatgaggaggagccaatcatgtggatatccagggcatgtgttgcaggcagaggatacaggatgtgcaaaggccccgaggctgaagcttccctggtgtgtctgaggagcccagtatggctgaaggatggtgaacaaggaggaaaatggggagaggcggggcagggagttcaccaggaggatcgtggggggtcttgtagaccacagcaaggattcgatcttttcacctgagtgagggaaccctggcagggctgatgtccttttctgatctctgaatgaggaggctggacatgggttatgggtcaagaagcaggagggaggagcctttggtggccttctgtgttaccatcagtcagaactttcctggccgggtgcaatgacccacgcctataagcccaggactttgggaggctgaggcaggacgattccttgagccaaggagttcaagatcagcctgggcaacatagtgagaccctgtctctacaaaaaaaaaaaaaaattattttattttttttttagataggggtcttgctttgttgaccaggctagagtgcagtggcgcaatcacagctcactgcagcctccacttcctgggctcaatcaatcttcccttctcagtctccctagcagctgggactacagccgtgcaccaccacgcctggctaatatgtctattttttgtaaagacagggactcactctgtcgcccaggctggagtgcagtggtgtgaccccagctcactgcaatctctacctccgaggttcaagcaattctcctgcctcagcctctcgagtctcactgcaacctctacctccgaggttcaagcaattctcctgcctcagcctcccgagtagctgggattacaggcgtgcaccaccatgcccagctactttttgagttttagtagagatggggtttcacaatgctggccaggctgctctcaaactcctgacctcaggtgatctgcctgcctcggcctcacaaagtgctggaattacaggcgtgagccaccatgcccasctccccccaattttttttttttttttgagacagtctcggtctgtcgcccaggctggagtacagtggcacgatctcggctcactgcaacctctgcctcccgggttcaagcgattctcctgcctcagagcctcccgagtagctgggactacaggcatgtgccaccatgcccagctaattttttgtatttttttttttagtaagaaggggtttcacagtgttagccaggatgatctcaatctcctgatcttgtgatccgcccacctcagcctcccaaagtgctgagattacaggcgtgagctaccccgtccggctaatgtttttttttttttttttttaattaggagggactgctggcatgtgtcagtaggctgargcaggtggatcacttaagccggggaggtagaggatatagtgagccatgatcgcaccactgcattccagcctgggtgacagagggagaccctgtctgtaaaaacttttttttttttttaatttttgagacagagtctcactctgtcgcccaggctgaagtgcagtggcccaatctcggctcactgcaacctttgcctcccaggctcaagcgattctcgtgcctcagcctcccgagtagctgggactacaggcgccaaccaccacaccctgctaatttttgtattttttagtagagatggggtttcaccatgttggccagggtggtcttcaactcctgacctcaagtgatccgcccacatcggcctcccaaagtgctgggattacagccatgagccaccgcgcctggcccaaaaaaacttttaaaaagaactttttcactgcaaaaaataatcttgttgccagccgaggccaacatgcagctatgacagggcagttctctgtccttcccggcctcaggctcctctatcaaaggcccccttctctcaccttggccttgtggccttggagtagggagctgacaacaccccttctgccccaggtgaatcaatgaacaaggctgacattgtgagaataccaagygtctgtcttcttccctcttctggcttagctcctcacctcccttggggtcagggcatctcctctttctccaggaaggggaagcgaagtcttgtgctgagaaggtgactctggaactgccactcccatgcctgtgtgactagcttctgggtggatctcagggtctaccgttgggctgggggtggatgtcatctggccactggcacccagactgcaagtaataaaaacctgactcacactggctctaccagcaagaggggatttgttggttcactgagctgaagtcagtttacatggctgacttcagatatggctggatccaggtgctgaaaaatgacagaaagcatttgccttctcagctcctcttctgtcttattctcaggtagtttctccccctcatggaggcaagattgtgccctgaagcttcagatatatattcttttttttttttttttttttttttgagacagattctagctgtgtcacccagactggaaggcaatggcccaatctcggctcactgcaacctccaccttttgggttcaatcgattctcctgcctcagcgtcccaagtagctgggattacaggcacgtaacacctggctaatttttgtatttttagtagagacgaggtttcactatgttggccaggttgatctcgaactcctgacctcaggtgatccacccacctcagtctcccaaagggctgggattacaggcgtgagccaccgtgcccagccatctctttttttgtttgtttcttcagatggggtctctctgtgtcacccaggctggagtgcagtagcacgatctcagctcagtgcaccctccacttcccgggttcaaactattcttgtgcctcagcctctgaagtagctggaattacaggtgtgcaccacacctggctaattatttgtggggttttgttgttttttgttttgtttgtttctttttgagacagagtcttgctctgtcacccaggctggagttcagtggcgccatctcagctcactgcaacctccgcctcccgggttcaagtgattctcctgcctcagcctcctgagtaagtgggactacaggcacgtgccagcacgcctggctaattttttgtatttttagtagagacggggtttcacagtgttagccaggatggtctcgatctactgacctagtgatccacctgccttggcctcccaaagtgtggggattacaggcgtgagccactgcgcctggccaattatttatatttttaatatagacagaatttccctgtgttggctaggctggtcttgagcccctggcctcaagtaatccacctgcctcagcctcccaaagtgttgggattacaggcatgaatcaccgcacctggcctaagatatctatcctatgcaatgctagccagaggagtaaacctcttttcccagtggtaccaccaaagtcccagagttagctctcattggctccacttgggttacatgctcatcctgaaccaatcacaatagccaggagcgggggataggctaattggccagacacaaagtttgctaagtctcttgggtccagctgcattcatgttctttggttgggggttatggggtaagggctgrctactcaaaggtaacctggagagacgacactgacctgcccactctcttttctgattttcctccagtgcccacttggatcttggtgctctccctgagcctggctggtgccctcttcctccttgctgggctggtggctgttgccctggtggtcagaaaaggtaacagcacgcaaagcctggcacacaagttgccagttgacaacttctggaacgtgaagatgtgcttacactcacaactcacaccattttgttttcaggttcagtaatttgttcatcacaccccttttaaaagtatttatttatttatttattatttttcttttcagacagaggctcgctctgtcgcccaggctggagtgcagtggcacgatctcggcccactgcaacctccgccttcgaggttcaagcaattctcctgcctcagcctctcaagtagctgggattacaggcgtgcaccaccatgcctcgccaatatttgtatttttagaagagatgtggttttgccatgttgcccaagctggtctggaactcctgacctcaggtgatccgcccacctcggcctcccaaagtgctgggattataggcatgagccacagtccccggcctaaaaattttttatttggagactcagtctgtcacccaggctggagtgcaatggcaggatcatagctcgctgcatccttgacctcctgggctcaagcagttctcctgcctcagcctcccaagtagctgggaccacaggtgcgtgccaccacatgcagctaattatttatttattttttttaggacagggtcttgctgtgttgcccaggctgggtaactcctgggctcaagcaatcctcccacctcagcctcccaaaagtcctgggaccacaggcacacactaccacacctggctaatttttaaaaaatattttttgttgagatagggtcttgctatattgcccaggctggtcttgaactcctgggttcaagtgatcttcctgcctcagcctcccaaaatgctggaattacaggcatgtgccaccatgcccagccaaattatgtgtgtttgtgtgtgtgtgtatgtgtgtgggtatatatgtgtgtgtatgtgtatatatatgtgtgtatatatatacatacacacacacacacatacatatatatatatatatatatatatatatttttttttttttttttttaagatggagtcttgccctgtcacccaggctggagtgcagtgaggcgatctcgactcacttgctctgttgccagcctggagtgcagtggcacaatctcgactcagtgcaacctccgcctcccaggttaaagtgattctcctgcctcagcctcccgagtagctgggactacaggtgcgtgccaccacacccagctaacttttgtatttttagtggagacagggtttcaccatgttgtccaggatggcccagcactttgggaggccgaggtgggcagatcgcgaggtcaggagtttgagaccagcctgggcaatatggtgaaaccccatctctaatgaaaacacaaaaattagccgggcgtggtggtgtgcacctgtagtcccagctacatgggagggtgaggcagaagaatcgcttgaacctgggaggcagaggttgcagtgagtcaagatcataccactgcactccagcctgggcgacagaacgagactctgtctcaaaaaacaacaaaaaaagaaagaaagaaagaaagaaagaaagaaagaaagaaaaatctgaggccttccaggctgggtggggtggcttgcctgtaatcccagcactttgaaaggccgaggcaagtggatcacttgaggtcaggagttcgagaccagtctggccaacatgacgaaccctcttctctactaaaatacaaaaatagcctggcctggtgatgcacacttgtaatcccagctactcgagaggctgaggcaggagaattgcttaaatccaggaggcagaggttgcagtgagccaagattgagccactgcactccagcctgggtgaaagaatgagactctgtctaaaaaaaaaaaaaaaaaaaaaaaaaacagaaattgccggatacaattaggaccaaaatctaacacatgctcatttcttttttgttccagttaaactcagaaatttacagaagaaaaggtgagatcatccctggagacccacagagggtggtttggggaaagaaggacacttccctggcagggtgggcactccatgccccccacaaacagcgcctcctggtgggcatgctgcrtaataggaacaggagccatttattaagtgcctcctgtgtgctggaggactgagctgggactctctgaagctggagctccttatccttatggcagccctggaaacaggcaccatgaatagccctattttacagaagagaggactgaggctcagcactcagtcacagagtgagcagtttgcccagggagaggcccttccccacacccctttacctccagctgccagaaaacggtcacaatcactctagacacccacagtcagtttctaaagaatgcccctggggttgtgcagtgcccaattgcactgtaggtgatggcccaggttcctgggcaccaggatgtcctaactggccctggcctcagtttctctcctccgagagtggggagacatcctgctgcctggagatgaaaacctgctctggggattgaatcccagcttcacctggctgtgggcctcctaaccaggagaatatatatatgtttttttttttttttttgagatggagtttcactcttgttgcccaggctggagtgcaatggcctgatctctggctcaccgcaacctctgcctcctgcgttcaagcagttctcctgcctcagcctcctgagcagctgggattacaggcatgtgccaccacacccggctaattttgtatttttagtagagacgggatttctccatgttggtccgggtggtcttgaactcccaacctcaggtgatccgcccgcctgtgcctcccaaagtgctgggattacaggcatcagccaccgtgcctggcttttatatatgtgtgtgtgtgtgtgtgtgtgtgtgtgtgtgtgtatgtgtgtgtgwatatgtgtgtgtgtgtatgtatgtgtgtgtgtgtatgtakgtgtgtgtgtgtgtgtgtatatatatatatatrtatatatatatatatatatatwtttttttttttttttagacggagtctcactctgtcgcccaggctggagtacagtggcgcaatctcggctcactgcaacctccgcctcctgggttcaagcgattctcctgcctcagactcctgagtagctgggactacaggcacatgccaccacacctggctaatttttgtattttttagtagagacggggtttcactgtgttgtccagtctggtcttgaactcctgacctcaagtgatccacctgcctcagcctcccaaagtgctgggattacaggcgtgagccactgcgcctggcccaagagaatttccatgtttttttcttcccccggccaaggggctgtcccacagtgtgacagctccagaaatcaggatgttactgctcttctgtggggaagacccatgggtcagtgggtggggagcaaaggctacattttgggtgtggtttggggccagggctttcccgatcaagcctcctgactcaaggggcaaccctgrtccctgtcactttctcctgaattcctttgcagagatcgagaatcctgctggscccagattaacttcgacagcacaggtctgtgcctccacactcctgactccagtggggaaaggattacacctccaaatgccatcaggcctcatcacacaccaatcaaatttcttctgtgactgcttgttccctttagggtcaaaacacaccctcgccacctcttcccctgggttctcaccttctctcctttgacttaacctaaaggtcacctcctctgggaagccttccctgactccctagacagggtctgtgcctgctacttacaggaccccaggtccgaccattcttcttacccctcggtagaaatacaattaggcggccaggcgcggtgactcacaactgtcatcccagcactttaggaggctgaggcaggcrgatcacgaggtcaggaattcgagatcagcctggccaacatagtgaaaccccgtctctactaaaaatacaaaaaaattagcagggtgtggtggcggacacctgtaatcccagctacttgggaggctgaggcaaggagaatcatgtgaacctgggaggcggaggttgcagtcagctgagattgcgccactgcactctagcctgggcaacagagccagactccatctcaaaaaaaaaaaaaaaaaaaaaaaaaggccaggcgtggtggctcacgcctgtaatcccagcactttgggaggccgaggtgggcggatcacgaggtcaggagatcgagaccatcctggctaaaacagtgaaaccccatctctactaaaaatacaaaaaattaggtgggcgtggtggcgggtgcctgtagtcccagctgctcaggaggctgaggcaggagaatggcgtgaacccaggaggcagagcttgcagtgagcccagatcgcgccactgtactccagcctgggcgacagagcgagactccatctcaaaaaaaaaaaaaaaaagaaagggccaggcacggtggctcacgcctgtaatcccagcactttgggaggccaaggcaggtggatcacgaggtcaggagatcgagaccatcctggccaacatggtgaaaccctgtctctactgaaaatacaaaaattagctgggcatggtggcgtgttcctgtagtcccagctacttgggaggctgagacaggagaatcacttgaacccaggaggcagaggttgcagtgagccaagattgcgccactgcactccagcctggtgacagagtgagactccatctcaaaaaaggaagaaagaaacaaaaatgaaacaattaagtgatcattgggtgcttgcatatttcatactcatttcctctgctgaacggccagctccatggggaaaggaccatgtctatctccgggactccagggccacacttgccttccagaacatgccattctgccagcttccccaagggggcgaaaggcagccagtctgtcatgcaggatattctcttgaaggcaccccaagcagagaaatgtattctctgtacttcattcctggtccaacacacacacttattgagcacttactatgtgctaagatctgagagggtcctttcgtaaccaagacagatgtgctgtctgtccacaagcccattctccaatgggaaacagcccgtgatggcaccagactgtgtctgggacaaggcaggtggtcccctgaggaagtgatgtttttctttttttttttgagatggagtctcattgtgtcgcccaggttggagtgcagtggcacgatctcagcttactgcaacctctgcctcccgggttcaagtgattctcctgccccagcctcccgagtagctgggattacaggcacgtgccaccatgcccggctaatttttgtatttttagtagaggtagggtttcaccatgttggcctggctggtctcgaactcatgacctcaggtgatccacccacctcagcctcccaaagtgctgagattacaggcaattacaggcgtgagccaccgcccttttgttgttgttgttttttgtttgtttttgttttgaggcggagtctcactctgtcgcccaggctggagtgcggtgacgcgatctgggctcactgcaagctctgcctcctgggttcaagccattctcctgcctcagcctcctgagtagctgggactacaggcgcccgccaccacacccggctaattttttgtatttttttagtagagatgggatttcaccatgttagccaggatggtctcgatctcctgacctcgtgatctgcccgcctcagcctcctaaagtgctgggattacaggcatgagccaccgcgcccagcctgtttttttttttttttttttttgagacagagtcttgctctgtcacccagacaggaacgcagtggcgcaatcatagctcactgcagcctcgacctcctaggctgaagtgatcctcccctctcagcctcctgagtagctgggaccacaggcatacaccaccacactcagctactttttaaatttttttttctagagacaaaaaattatgttgcccaggctggtcttgaactcctgggctcaagtgatcctccctccttggccttccaaagcgttgggattacagccgtgagccacctcacctggctagaagtgatgtttaagcagagacctacaagaatgggtaatggaggccgggtgtggtggctcacacctgtaatcccagcattttgggaggccgaggcaggcagatctcttggggcaaggagttcaagaccaacctggccaacatggtgaatccctatctctactaagaatatgaaaattagctaggtgtagtggtgcatgcctgtaatcccagctattaggaggctgaggcaggacaatcacttgaacccaggaggcggaagttgcattgagccgagatcctgtcattgcactccagcctgggcaacagagtgagactccttctcaaaaacaagaaaaaaaaaatgggtgatggagcaattggaggagagcctggggaggaggaggarctggcaggtgctccttctggaaggcctgagataagacacccattttcctgagggcagtgagagatacccctaggaagactgtgtgtagaaggacttggttcactttgtagctgtgaacagttcaccgtgcagaatgggttggaaaggcgccatagaggatgctgggagatggaccccaattgcttccctgtgggctggggggcagtgcggggatggcagggagcagggaagttacaactggcccccaatcctgggttttctttctctttctgtttcagacatgtccttcgataactccctgtttaccgtctccgcggtgagtggttctttttcttggaaccggttttctgctgaccgtcctaccgggagaacggggcgggctcaaggggcaccacgaggctaagttgacctgctgtctctaagctgcgggggggctaggaaaagcccagaatcactgaacagggactcagtagtgagccgagagttggctgtgaaaaaatcccagggggtgtgttaattgaaggtggtgacgtcaggctgtcttgtggccacaggcaggcaggccccttggtggtatgtcctggcctggtcagtgctgcctttggtctcagtcatgacagcccctcagaatggtgacagaggattcagggtgacctggtggcctctcatagaggcttgtgacaatctgtgtcacaatctgtgacaggctgtggtcggtcccctctgggtataaagaaaagcatgaagttgctgggtgcggtgactcacgtctgtaatcccagcactttggaaggccgaggcgggtgtgggtcaggagtttgagaccagcctgaccaatatggtgaaacctcatctctgctaaatacaaaaaattagctgggcgtggtggtgcatgcttgtaatctcagctacttgggaggctgagacaggagaatcacttggacccaggaggtggaggtagcagtgagccaagattgaggcattgcactccagcctgggccacaagagcaaaactccatctaaaacaaacaaacagataaaaatgaaaaagtacaaatgccaaggctaccccaaaatgtagctgtgcagagagtcccatagacccaggtttaaatcccagccctgacactgtgtgacaatggggaacaatatcccccaaaagcagagggagggatttgttttttttcaagacagagtctagctctgtcgcccaggctggagcacagtggtgtgatctcggctcacacaacttccgactcccgggttcaagcaattctcatgcctcagcctcccgggcagctgggattacaggcacatgctaccacacccagctgatttttgtatttttagtagagacgggggtttcaccatgctggccaggctggtctcaaactcctgacctcaggtgatccactgggattacaggtgtgagccaccatgctggctggctgcggaagctgctttagacaggagatcaggaaagtctgagatgggtgacaagcaggaggtggggaagattggggatgattgatccaggctgaggacacatttttggcacagcccagtaagctggggtggagtgaggagtcgaaggggaccccatgaagaactttgattttactgctattgagctgggatcccggaagggttcctagtataggagggaggggaccggattcaggtgcacacaggcgccctctggtggcttctgcaggaggacagatttggggaaagcggggatcagtggaaggcaggagcctggagactgaagagctgggccaagcgtgcaccaaagggtgggtggtttggtccaaaatgttggcagtggagttcgaagaagtgatcagatgcaggttaggggagatataggggagagaaaacacagagctgatttttgatgagggggccaagggagaagagggaggccaaggagggtgaggcttggagggtcaggagtgtggagtcagccacctcaacccatggcgcctgggagcagatggagaggggagtctacagttcaggagagaggtcagttctagagatagactaggagtgcctgggatacagatggtaggaaggaagggggcttggcacgggcctgtgcagccctctgaggtctctgcttccagaataaatcctgaggccataagaaaaacccggcaggcagggctcaatctaaacgtttccatgagaatccacaccgcacagaacaccagcctggtgatgccccctctccccactttttgaggtagtttttatttatttttgtttgttttttgagatggagtcttgctctgtcacccaggctggagtgcagtggcttgatctcactgcaacctccacctcctggattcaagcgattctcctgcctcagcttcccgagtagctgggattacaggcgcctgccatcgcgcccggctaatttttgtatttttagtagagacgggttttcatcatgttggccaggctggtctccaacaaccgacctcaggtgatccgcccgccttggcctcccaaagtgctgggattacaggcatgagccaccatgcccggccttttatttgtttttttactttttttttcttaaattaaggaccaggcgtggtggctcatgcctgtaatcccatcactttaagaggccgaggtgggaagattgcttgagcctgggaggttgagtctgcagtgagctatgattgcatcactgcactccagcctgggtgacagagcaagactttgtctcaaacaaacaaaaaatttccgtatgaaaagcattcacatgtcaaaatatacaataaagttttcttactaagccatgcctcttcatccattggtattcctttctgcagacatacaggtaaccactgttagcagctgcacgtggcaaatacacgcagaagtggatctgtaccttcacccaccacccccgccaatttttttttgagacagggtcttgctctgtctcccacgctggagtgcaggggcaccatcatagctcactgcagccttgatcacctgggctcaaaagatcctccagcctcagcctcccgagtagctgggaccacagacttccaccaccatgcccagctagtttatttttatatatatatttatttatttatttttcttcctttttatttttaaattttattttattaattttttgagatggagttttgctctttcgcccaggctggagtaaagggatgtcatgatcttggctcactgcaacctccccccctgggttcaagtgattctcctgcctcagcctcccaagtagctgggattataggtgcctgccaccatgcctggctaatttttttttttttttgagacggactctcgctctgtcaccaggctggagtgcagtggtgccatcttggctcactgcaacctcaacctcccaggttcaagcgattctcctgccgagtagctgggattacaggcgagcgccagcatgcccagctaattttttttttttttttttttgtatttttagtagaagcggagtttctccatgtttgtcaggctagtctcgaactcctgacctcaaatgatccacctgcctcagcctcccaaagtgctgggattacaggcgtgagccaccaggcccggccttttttttaagatacagtttcactttgttgcctagtctggagtgcagtggtacgatcttggcttgctgcacccaggttcaagcaattctcatgtctcagcttcccgagtagcttggattacaggcacatgccaccgcggctggctaaagtttttttttttggagacggagtttcgcaattatcgtccaggctggagtgcagtggtgccatctgcagcctccacttctggggttgaagcgattctcccacctcagcctcccaagtagctgggactgtaggtgcctgataccacacctagctaatgtttgtatttttagtagatacagggtttcaccatgttggcctggctcgtcttgaactcctgacctcaggtgatccacccacctcaacctcccaaagtgttgggattataagcatgagccactgcacccagcctaatttttgtataatttttgtatatttttagtagagacaaggtttcaccaagttggccaggctggtctcagactcctgacctcaagtgatctgcccgcctcggcctcccaaagtgctggggttacaggcatgagccaccgtgcccggcccagaaatttctcatcctcccaaacttgtctccgtgcaacacccactccccgttgtccctcccccagcccctggcacccaccattctcctgtctctgtggatttgcctcttctggacatctcatggatatgagatcacatgatatttttccttttgtgactggcctgtttcgctgagcttgatgtcctcaaggttcattcatgccatacgtagcctgtgtcagaatgtccttcatggcaggcacggtagcacatgcctataatgccagcactttgggaggccaaggcgggcagatcacctgaggttgggaattcgagactagcctgaccaacacggagaaaccccatctctactaaaactacaaaaaaaaaaaaaaaaaattagccgggcatggtggcacatgcctgtaataccagctactcgggaggcttaggcaggagaatcacttgaacccaggaggcggagttgctgtgagctgagatcacgccattgcattccagcctgggcaacaagagcgaaactccatctcagaaaaaaaaaaggaagaacattctttttttttttttttttttttttttttttgagacagtgtctcactctgtcgcccagactgcagtgcagtggtgtgatctcggctcactgccacctctgcctcccagcctccagcgattctcctgcctcagcttcccaagtagctgggattacaggcgcctgccaccatgcccggctaatttttgtagttttagtagagatggggtttcaccatgttggccaggctggtcttgaactcctgacctcaggtgatccgcccgcctcgacctcccaaagtgctgggattacaggtgtgagccaccgtgcccagcctgttcttcctttttaaggctgaatcatattgtgttgtatggatacaccaagttttgttgatccattcaattgttgatggacacttgggttgtttccaccttttggctgttgtgcagaaccgtgccatgaccatgggtatgcaaatttcttttggagtctctgctttcacttctagtttccttttgaagccttatactgctttgtcgttggytgaaatggtaaggcagcagctgacctgtctctagctttccccattaccttgctgagtgtctgatatgcaactttgtaacaccctttcaggtgggatcgattattttctttttacgaacaaggacactgaggctgataatgggcctagggtcacccagcttgggagggacaggactgtgggtggaacccccagcctgctgtcaactgagtggctttagttctagcaaattcatctctctttaactaggatcagggtcaggagcctccaaggcagaggaggaggtagacttttgaggaatgttttgcccatgggcaaatgggaggggaggaggagataatactatttattttttatttatttatttttttgagaccaagtctcactttgttccccaggctggagaggagtggcaggatctcagctcactgcaaccttcacctcctgggttcaggtgattctcctgcctcagcctcccgagtagctgggattacaggcgtgcaccaccacacctaatttttgtatttttctgagagggtttcaccatgttggccaggctggtctcgaactcctgacctgaggtgatccacccacctcggtctcccaaagtgctgggattacaggcgtgagccactgggcccaacagaggagataatatgaatggttgtgttcacttagcaaagaagagcttacgatgtgccatttgctttatcagttttactcttttaagcctcatagcagccctaggaagtggtgggtactagcattctgcccgttttgcagaaggggaaactgaggtatagaggggtgaagccacacaactgaggttacactgctataaagtgaaggaactggtgtttgaatccatgctctctggtccccagtttagcagagaggaaggcaggagaagggaagaccaggacaggtgggtgtgggtgggggcgggatgagaggagacctgctgggctggcagagtctcaggctcagaacatggagaaaccctagatcctgaaaccccaaatcacccacttctgtgtttcttcttacatggacaaagaaaacgatgccagaagaagacccggccaccttggatgatcactcaggcaccactgccacccccagcaactccaggacccggaagaggcccacttccacgtcctcctcgcctgagacccccgaattcagcactttccgggcctgccagtgaggctgaggactgggggacccctctgtctccaggcattcgggggcctgaggtccctccagctacttctgggggggctctgtcagccactttctcagggaattggacagaggaaaggaaggggaaccctggccttgggattttcatcacagaggagtgggagaggggacacaggcatgggcctggcactatacagacaacaggaagttcccctctcgaccttcggctcctcaggaccaccagagaaggagatgtcaggaccccttcttgtcccccagctgggccataagacgtcccaggtctctgcacaccygtggaattcctcccttccccagtgggtttttgagcatagggtgcccttgggtgtgttgtgtgtctgcctgctggcttgcttaagttattaattataacacgggtcaaggtgttcccaggcctctatggagtggaatccttcaagctggggacctctggatcccatggttggatggctggggggtggagcgtgtctgaattcaccaaatttgaagcatctctcaagggcagtcagggtggtgtatgcggagcctcctgggggtgtggggagtgcagcagtgccatgccagggtctctgcaacggtacttgcattagagggtttaggaggtggaatgacaggggctacgggtgagggacatgaaggagaatgagggcccctcgcagtggctcacacctataatcccagcactttgggaggccgaggcagggggttgcttgagcccaggaggttgaggctgcagtaagctatgatggcaccactgcactctagcctgggcaacacagtgagaccctgtctcaaaaaacaaaaggggccgggcgcggtggctcatgcctgtaggcccagcactttgggatgccgaggcgggcggatcacctgaagtcaggagttcaagaccagcctgaccaacatggtgaaacctcgtctctactaaaaataaaaaattagctgggcgtggtagagcatgcctgtagtcccagctactcgggaggctgaggcaggagaatcacttgaacccgggaggcggaggttgcggtgagctgagatcgagccattgcactccagcctgggagacagagcgagactccgtctcaaagaaaaaaaaaaaaaaaaaaaaggaatgaggcgtaaatgaggtctagggaagagttaaagctggagtgctaggaagtggcccaagctcactgggtcgcccaaaagagatggggccacccaaaatgaagggggatgcagagagaagacgggtttgtgtggcgggagaggggccctgcgccgggccgggctggactcagcatcgttggaggaggggctgagagaggagggggtcaaaggatatcttgtgcgaaaggagacagtcaaacattaaggattaagaaggcaatgtgggcagagatgatggggaagggaggaggagcggtcgaatgtcggggaggggtcctttcaaccgggctcaggttgctcctggaggccagggctcatcggaaatcgtcggtgcgggggcggtggggggaagggttgggggcgaggcccgggcgctggccacgccctttcccccgcccattccccagagcggggcggctgacaaagcgagtccgggtgggagggcgcgggcaggcacgggggcggggcctcgtcgcggctgggccacgcctccctgagggctgcctcacaaagccgggcgggcccgggggggtggggcccagtctcaggggcgtgtccaggtcggggcagggaagccgcatcacgacgcgcggctgcttgtgtggggcggggtacagggcgtgtccacgcggccgagcaccgcccccgccgtccccgcaccgcctcactcgaaagcagccgttaatgaggcgccggcctgggggcggggcccaggcctccgaggggcgtgcccgcgcgcccgagcaccgcccccgacgtaccctcccgccccgcagttcccgggcggtggagccacctcacaaagcggcgaccgttctcgcggggcggggcgtagccggtcccgccccacggggtgccctctcgttcgctcgctagctccccgcgcccaggacggccggcagagggcgctgcgccacggggccgggccgcggcgacggtggcggcggcggcggcgaggcggcgcgtggccggcaggcggcgctgcccggctcggcctcggcctgcacggcggctgcggcggcggtagcggcagcggcggcggcggcggcggcggcggcggcggcggcggcggcggcggcggcagcggcggcggcctgggcccgggcgcagcggcggcggcggcggggcctggagccggatctaagatggcagcggcggcggcggcggtggggccgggcgcgggcggcgcggggtcggcggtcccgggcggcgcggggccctgcgctaccgtgtcggtgttccccggcgcccgcctcctcaccatcggcgacgcgaacggcgagatccagcggcacgcggagcagcaggcgctgcgcctcgaggtgcgcgccggcccggactcggcgggcatcgccctctacagccgtgagtacggggccccggggcaggcgcagggccggggctgctcacgaggccggcccggggcgggggccggcggggaggggccctgagcgcgggggcctggcgtggggtccccgggactgagccggtggcctgcagggagcgaccgtggagggccggtgccaggggacagacagagaaaagagggcgtgcgtggtggccggaggggcaaggtgcccagagtgagcaagggagcgcgaaatggggagtgaagggcctgagatttgggaggggtgggtgagcaggaagtggggggctctgagtggaaggggaatttggaggacgccaggcgtggtgggcttaagcgtgggggagggaggtccggggtgcgggagaggtgggcgtctcgggggcgggcgtggccgcctctgcagggaggagggtggggcgtgggcggcccgggatccctctggggaccccctggatagctcaggacggttggaaagtgtttgctggtctggggcgcccgcgagtaccgagttccaccgctgtgcgaggtgtggcgttcaggacccccgaatgggaaacttcaggatctggggagagggcccatgcggggacggtgggagccgcagggtgagctcctcgtggaaacgtggacgggacgggccccttcctgatgccgggcttcgaagtaagagctaacagcctcctcccatcttcttttgggggatgtgagaagctggttacattttccgaagctgctttcaaaactgacatttcactggggggaaaagaaaatcacaaatgcgtttgccagcaccccccacccccgctcccagtctttgtagttcattcttcttcttgttactccttcttatctcttctctttgattccttgttcacattttgctactctgtgtcatttggctttgtctttcagggcttcttgcactgatgccctggggaacccctcaggaggcctctagctagcttgggtcctgtgtgaattttttgccactttggaaacggcccgattaaaggaaagcccgaggagcagtccgttcacactgggttttccctgcacctcgactttgaaaacgtggactaaaggagttgtgtctgctgtccgagggtgccgtctctttttgctggtgcagagcctgggtcttcttggaccagatgagaggggaaggagggtatttcagcgggggtttcagagttcaaggcagacactcagctcaacagaaccccagatcataagcaaaacctattcactgggcaagcattggtagccaactttgtcctgaacagaacaaagcggggcagcgtttccaaaactagggtcccagggcttatcctcaaaggagttccaggagagttggctatcatttttaagtaaacctttaaaaaatttttttaggaccaggcggggtagctcagcactttgggaggctaagcactttgggaggatcacttgaggtcaggagttcgagaccagcctggccaacatggtgaaaccccgtctctactaaaaatacaaaacagcggggtgtggtgacatgtgcctgtcccagctactcgggaggcagaggcaggagaatcacttgaacctgggaggcagaggttgcaatgagctgagatcgtgccattgcactccagccggggagacagagtgagactccatctcaaaaaaaaaattttttttagaacaattttagtttagtttttttttttttttttttttttttttttttttgagacagagtcttgctcggtcccccaggctgaagtgcagtggctcaatctcggctcactgcaagctctgccacctgggttcacgccattctcctgcctcagcctcccgagtagctgggactacaggcgcctgccgccatgcccggctaattttttgtgtttttagtagagacggggtttcaccatgttagccaggatggtcttgatctcctgacctcgtgatccacccgccttggcctcccaaagtgctgggattacaggcatgagccaccccgcccggccagaacaattttagtcttatagatgtattggcaacatagtgagatgttcctaccatcttattcctggagtaacattttgtgtttgtatttgtgtttttgtttttgttttgttgatactcttgaaagtattacttgttattaagacagcacttctctttgagaggtaattggtaactgaaacattttttattattagagacaaggtttcactatgtcactgtgttgcccaggctggtctccaacttctgagctcaagtgatcttcctgcctcccagaatgctgggattacaggtgtgagccaccccacctgaccggaaacattcataaaaaggagaaagtccacattcctcagagagcctcagtcccagattcccagatgatatatccttagggttctgaaataatttttttttacacttttttgttttttttctttcttttttattttttttatttttattttttattttttcagacagggcctcactctgttgctcagactggagtgcagtggtacagtctcagtctcagctcactgcagccttccatggctaaagtgatcctcatacctcagcctccctagtagctgggaccacaggcatgtgccacacccagctaatctttcatattttttgtagagaaagggttttcactgtgttggccaggctggtctcaaactcctgggctcaagtgatcctccctccttggcctcccacagtcctggaattacaggcatgagccaccgcaccgccctctttatccttaagtaacattgatatggagataaaaaacatgggttcttggccaggcgtggtggctcacacctgtaatcccagcactttgagaggttgaggcaggcgaatcacttgaggtcaagaggttgagaccagcttggccaacatggcaaaatctcgtctctgctaaaaatgcaaaaattagccaggtgtggtggtacctgcgactgtagtcccagctactccggaggatgaggtgggaggatcgcttgaaccagggaagcagaggttacagtgagctgagattgcaccactgcatgtcagcctgggtgacagagcaagaccctgtctgaaaaaaaaaaaaaaagcatgggttctggagttggaggtgatcagtgctgggtgtattaatttcccatggctgcaataacaaattatgacagatttttggtttaagacaacaggaatggattctctctcagttcatggtcagaagtctgaaatcatggtactggcagggccacaatccctggagaggttctacaggaaaatccttgcatcttccagattgcagtggatccagctgttgcttgatttgcagcagcgaaacccaagtccctgcgtctgtcttcactcctgtgtcttgtgtcctcttttttccttttttttttaaagtgagatggagtctcgccgtgttataggctggtctcgaactcctaggctcaagtgatcctcccacctcagctgttcttttcttttctttttttttttgagacggagtctggctctgtcacccaggctgaagtgcaattgcgcgatctccgcttactgcaagctctgcctcctgggttcaggccattctcctgcctcagcctcccgggtagctgggactacaggcgcccgccaccacgcccggctaattctttgtatttttagtagagacggggtttcaccgtgttagccaggatggtctccatctcctgacctcgtgatctgcccaccttggcctcccaaagtgctgggattacaggcttgagccaccgtgcccggccccagctgttcttttcttataaggacactgggcattggatttagggcccac

SEQ ID NO: 97348 - DNA, 32566 bp, Homo sapiens
  misc_feature (1)...(32566): n = A,T,C or G
aaattagcggggcatggtggcgcatgcctgtaatcccagctactcaggaggctaaggcaggagaatcgcttgaacccgggaggcggagattgcagtgagccgagatcgtgccattgcactccagcctgggcgacagagcaagactccgtctcaaaaaataaaataaaataaaaataaaaaaataaagtagccccagctcagtgactctccatgggattaccccttttcactctattcgagacaaatgccattaactgaattatctcattcattcattgtattcatgtttactgcttgccctttcccacagacagtgctcttgaaggtagggtcctggtctgtcgtgttcacctctgtaacccgagtctcctgtgtcttcaacagagcaggtgctcagttaacatttgtattacagaagaggaggaagctacccgggtttggcttcttaaccaaacttgtgaagactccctaggattcgtcggatcgcctttaacgtcggtaactctggagtgtgaaatcagtcatccttctctccctccttctcaccctccagccagccccccatctcggacaaagcgctacgcctgctcaactctttgcaaaatataactctgggaggcccgagactggcgcctacacggccttggcgctgctgagccatgctcctggcccgtcacccataagcagcgagaaagcgccaagtttccgcagcccccgtccggccccgcccgccaggggaggaggggggaaggggaggacagagccgcttaccagttcatccggactcaggactccgaactggactctcttgatggtgcgcagcgggcatgcgctgtcccccgagggggggccacccccgtgcatggcggaggcaggcgcgctgcgcaggcgcaaacctcactacaaaaagcctgcgccgcctccgcctaggtgctcagacctcgtcagggcggccaccgggaaggacctccccgagttgggaggaaaaagccggaggaggggaaggtgggggagggaaggaggcggggaaataaggagcgaaaggagcccttctttcccttaccggaaatttttcagctcccaaaaaggaaaaaaaaagaagggaaaaggaaaaggtttttgggggaggaagaagaaaaagggtaacgaataaataagtaaccgggttcctgaacggcagaggttacggcagtttgtctctcccccttccgggagccgccttcttctccaaccgtcccggccgcgctctcggcgcttctgagcagcgaactcgctgaacgacgcttcttatagattcgccctcgcgtccccgccccttcctttcccgccctcccttgcgctacggggcctcctgcgcaggcccgcaaggggtgcgagccagagtcgtgggtaaaccccccgctcgctggttgggcgaccttttgaagtgacagggagagaagaatttttttctttaatcccaccgcctctcctcgctgctcccttttgcactgaggcttaaggtttgaagactcgagggtaaaattgggccgctttcattctagtttggacaacggtttcatcttcagcaaaagcctctcattcgtagcctcccccaagctggaaaatggtctgctctgcgaatcggtaatggcggcggggcggggcgggtcctcccggggaagggcggttgctcatgaatatgcagttctcttgctgaatatgcatgaacaaaccaagatggcaggaccagtggcttgtccggaagtagccgatgtttgtcaaacggcccccggagacgggtgggcatctcctggcctgtaatgccgcgctgtaccgagccatgatcctagatccatggcctgagcctctcgaagagacttcagctgggaggcctgctctggaaggagggtggccactgtccgggagagatcacgggaccgcgacaatccgagaaaagcagattagccatggggcgggccacgaaagtcctgggggatttggggtcaaggcatctgaacattaggaaatcctccactttgtagaatatttcaggaataaaatggggggcggggatcccaaggggttctccaatgagaacggtcgtaggactttccactctccctccaaagcagagacgacaccactgcaagccacattcagagtaatccttgtttgatgtcaatgtcacgtcaccaccccaaggggggggcacaagcacgaggaaaggaaacctttgccgtgaggggaggggnnnnnnnnnnnnnnnnnnnncagctgctggctctgtctttgccggaacactccagccccaatgctcttctctttgctgctgagtgaagtcctccccgtggcccacggcctccctgcctcagccgtttggatctgctcctcagactttaccccttagttatgccctgattccaggacccagcctggtctccacatcccttggtcccaggctggccccaggtcttccaggtagtccctctccaccaagtccccaagtcacccttgactctgagaggtatccttctcccacaccagttcttttccagtcacttctcctcccatgtttgtcttcagtctttgcctctatttatccctgtccctcccaacccccgggctcccaagttctatctcactcctccaccttcccttccctctcacagctgaggttctgggctgtgatgatggcaatgctgcccagcacaacccctgcccccacgatgtcagaaggtgccacagtctcatggagcatataatactgcagtataagggccaccaccacctcggaatgcaggacagcgcacaccagggcagggtgggccttggtgaccgcatagctcacacatgtgaaggagaccaaggcgaggatccccactgcccccacacaactccaactcaggagatcactgggcaacacggggggctgcagcacaaagaggcctggcacagagcccagcagccccaccaagccagataggaaggccactgttgggaggcaggagggaaagtgcagagaacgatagaccagaagccccagggacagcgccagtcctcccacgaaagcctgcccatagcccagggcggtgtagacacccgtgatcccctcctgtagtgtccagagtccaggtcccacaatgatgattagtcctaggatgctgcccaacagtccacaccagtcgtagccactgagaccctggctctcaaggcagagggtgaggacggcggagcagacggtggaagaacctttgcgaacagtggcagcgttgccagcgggcaccacctgaaccgcactgtaggcacatccaatgctgaggacgttgagcagggcatagaagtaggcccggcctcggatgtcaggaggtcccagaagggggtcgccacgcagtttaagtagcagggcaatagggaggtggaagaggcatcgacagatgagcagctccagcgagggcaggttggaagcctggtaagccatatgagaaagggggcccacgaagccagcaggcaggcccccacccagcagggccaccagcaggccattggtggcatcagagggctggcagcactggtgccagcggaggctgggtggagcggagggcggcgatgggtgtgtggagtcaggcgggttcaagtaggggtgactgccagcctgttagggagaaaggagctcagggtagacagcagccgcagcccaggcgacctggggcagggcagatgccaggatggggtctgggaccctgtgggactgtacagtgttgggctatcttgctgaggaactcttgggagctagaaagggcctaaaagatgagtgagatgttataatgtgggcctggagcaggaagcaaggagtgagcagtcctggagcatcgtttccctgggtaagttgttcctgggaggagaaaaaggacccaggatgctctctcggattgaggaaggggaggaagcctcagatgctatgcatctgtatgatgccacaggttccagagacatctgggtacaccattatgaattctatttgtgggtatctctgagacagctaagttttaggaaaggaggggaaatggagcaaccaggagctatagggagggagtactaggcccctggcccccacactcaccatctttccttggactttctcctctcctcctggctcagggagcctgggcccctcagagctccagccattgtgacatggttggagtgggggtggggttcttccctggaactctcctgaggtggtagcacgcctattttcccgctgagtccaactctgcttcttttctttctttctttctttttttgtttgcgacgaagtttccactcttgttatccaggctggagtgcaatggtgtgatctcatctcactgcaacctccacctcccagattcaagcgattctcctgcctcagcctcccaagtagctgggattacaagaatgtgccaccacacctggctaattttttttttttttttttgggacggagttttgctcttcttgcccaggctggagtgcagtggtgcgtgcaatctcggctcaccgcaacctccacctcctgggttcaagcaattctcctacctcatcctcccaagtacctgggattacaggcatgtgccaccacaccccgctaattttttatttttcgtagagatggggtttctccatgttggccatgctggtcttgaactccttacctcaagtatccaccccaccaccccccgcctcccaaagtggtggaattacaggcatgagccaccgtgcccagcccaactctgcttcttttctatttatgtctccatgactccaaagtttgtctgattcttttattctttttatggctagctctgtggctttacattaatttgtttatttatatcttgcatggtttcagagaggtttttttgttgttgttgtttttttgagacggagtctgtctctgtcgcccaggctggagtgcagtggcgagatctcggctcactgcaagctccgcctcccaggttcacgccattctcctgcctcagcctcccgagtagctgggaccacaggcgcccgccaccacgcccggctaatttttttgtatttttagtagagacagggtttcaccgtgttagccaggatggtctcgatctcctgacctcgtgatccgcccacctcggcctcccaaagtgctgggattacaggcgtgagccaccgcgcccagcctcagagaggttttaaggcaaggagctgtgaaccctggctcctccatctccttagtttttaattttccagcaccagggaggagttcttgggattgtccctgtggagtttcaggaatgtgttttttctgtgtgtgcttccacctggtgttttgttgatgctgtccccagaggccgacaccaaggcctctgcatttatgttcaagtatacagatgtggatctatctgctggtggggacaaagtacccagccagcttcatgtgttcatttgcgctggtggtcgttcgtgtgtgccccgtatgcagggccagggccttctttttccgcggcctgctgagctttcctgcgcattcctggagagggtgtgtgtgtgtgtccagggctggccctctttgagtgtgccgaccctgggtctgtgagtcccaccgggcctgattatgagtctgccatgtcatgtctgcaccctgagagcctgtgtgttatgctttcaggcagtgtgcaccgctgagtgaagggcgtgcaggaggaagggcggagggagccctttccctgggggtcggtggtcttgcgcccctgccgggatgctgcagcccggcccgcgccccgctcggtgtccacccgcccggtggcccagcgcggcgcagtgtcatgccgcgggggtcagtcctggggaaggccgtcgggcgctcggagctttgtgtcggtgtcggctgcgctgcgccggcctcctctcggcggcggcggcggcggcgctggggggggactgtttccgggggtgggggtgggggggtaagaccgggggcggggggagccgatgatgtcagcggcggcggcggcggcggcagcggggccgggccggggcccggcgctgggggggccagggccggagctggagccggagccggagctggaggcgggcaaaaccggagcggccgggggcggccacggtgatgagccgggcctggcggacgcggcgccatcgcagtcagggtgggccctggggcgaactgggcagggccagggcggaccggagccaactgccaggccccctctccgctgcccggcgctgcgggagccccgaccgcgccccgcgcccagaccgctctcctttggggttgacctgggggcgcaggggtcgggggctgagcctggccccgcccccgggcgcgcacgacgctggggggcgactaagggggccctggtatggcgtccgagcgaggggcggccgtgggacgcgatcgcctggggccgtggaaggggaggtgctcactccctctttgaagggttaattctgcagcctaatggccccctccccccgtggggcagattgggggtggggtggggcgggtgtgagcccgggcaagcgctgcaagctgctgggagggtgatggcgtaggagccaggcagagagggggaggggtgggccgccgagcgccccagagttggggtgtgcggggtgcgcagggcgagctggggccccggaaccgccgcgccgtcggggcagggttgtggctgtgagtcttggagatcgtgtgtcttgtgctgtgtggtggggcaaggtaaacctctcctgggcaccaccgtttgctggcagccaggggtctgggtagggccctccctgggccatggagatagaaagccaggaagggtgtccagtgttgtggggcagagttacaagacgagccctgtggctttgggtgacagatgggtattctgagcagggcacagcatgctgggtgcagagtttgttcgatgtggggctgtatgttttctacagcatgtgttttctcgcatgtgtgtcttgtgctgcacctatgacctgtttatgaactgttttctgcagagctggcatgctgtatgtgttgcggagggtgccaggatgcagtgtatgtgcccttttggagggggcggttgtgggcctttgagtcagaaggcgtcacgtctgggtcccatttctgtggccctgctgaggtgtggtccagtggtgaagagggcgatggatgggtttgcrtgtctgtgatgagcgcgttgcatgggggctgcgcgtctagaactcagatcccaaagatcatgagaggagcgaggaaccccggggtatgtctcaggggcctgtgggtcagttggcactggtgtgaggggctcgaggtggaatgcgccagttgtgtttatgggatcatgggcagccaagcgaggggaaggttgtgtgtttgcaacattctccacaggattcttttgtgacgttgtttgtaggagcctgtctgggctgctgagctgggaggcaaactggtcagaaaacacatgtggggagggaggtggcgtgacaagggcagtgtgggcctcagacccaagaggccagccgcaagcaggctgtgtgtgcgtgcctgccgtctgtgtgcttragtggcggtggggctgcggaggggatttggtatgaggaaggcgggagataaatgcagggtagcgcatggaggccggcgggaggcatgggtgttgtcagatggcccagctaatctttgcagggtctgtatgtttgcccctcatgagcctgcccagcgtgtcagggtcacccggaggagaggctgggcggccacaagggaagtaagcttagacagagaggctccttggccatgtttatgtaaaggctgggtgtgactcttgtcactaaaatggaaaaaagaaacgtgaagttttcagcctcctcctgcttcaccctctccctctctctgccccccttgtgggtatctctgacgcacactgggccccactcctgcgacggtggaagggcctcagaacagaattcgctcactaggcagattcctcagaacaggttttcctcacctttggggactgggcccttctaggggtgtgtgtgcaagtgcattccaagcctgcacaccactgtctactgtgcccggccccactggaaggatgtgtgtacgtgggggaagggagggtgctgcggacaggccctccggcatggggggctgggaaggggtggctgccgtgggagcctgctcaacaggtgcacagtgacggtctggtgaagagaaaggagccatggtccagggctgaggagctctggcrtctttaccattccctcactggcacttgatctgaaggaagctcagttcctcatctgcagaatggggctgattgtctgccctgcgtatcttccaaaagcacatgggaaacggacccggaaagtggctatagtctgggggctgtgcctatgccagcccctgtcagccctcccccaggactgggaattcccttcttggggcttcgctgataataatggcagcacacacttgcttagcactgaccgtgcaccagcctgtcctcagggcacttatatgtggccactctgtcctcagaacaacaccctgaagtaggcactctacctccctttttcaagtgaggcagctgaggtccagagaagttaagtaatctgccccaagtcacttagctagtaagaggtgaagctgtatttgaacccgggcaatcaggttgaagatcttgtgctcttaactactgtactctgctgccttctggaacattcagtggatggtcctttctgtgcaactccctccaacactcttctccccagttgctgcagaacttagcatttgcagcagtccatttcagaagacccggatgctcagggatccccagctgagggcatgagaacctgagtctctgctgctgtgtaaggtggatgctggccataggagcacaaaaggttgatgagtcagaggaaggartgatcgttctcatcctgtggatcagggagggccaagaaggaggtggccttggagtcagatcttaacgttttggagggattttgacaagcttggggaaagagcatttctggcagaacaagccagcacaggcaaaggcatgaaggtgtgggtcatgtagaagctggagagcacactgggtgtctggggttttgttcatttgtttagaaactgggtctcaatatattgccsaggctggactcaaactcctgggctcaagcaatcctctagctgcagcctcctgagtagctgggactatgggtatctgccatcacgcctggctcacgctgagtactgtgtgtttgaagaggataacayaaggcaagattaaaaaggaagattggagctagwccagagcccttgactgcctggtagaagaatttgaactttcttctagagtcagtggggaccagtggaggttttgagcccaggagtgatagtcctgaactgtggttagggacgttgaccctcagggggaggagggctggatggaggaaggtaagcctggaggccaggggatagctgggaggccataaccttggaccacgtgagtgttaacaaggacctgagctatcgaagggaagatttccagagccattcccaagctcggcggcgatttcagccacacttgatgactgctggatgtggaagtgagggaaagggtggagtcagacatgacacatttagcacttagcacgtgagaccttgtgcggtggtttatgtaaccagctggcgggccataggcctcttcagggccaggtctagcagtatggcagagggaaagattgagcatctggggtcagctgggcctggattcgaatcttgactgctgcttacaagctgtgcgacctcgagtaaggtatatccctctctgagcctcggtttcctcttctgtaaaattagaataatatggccgggcgcagtggcccatgcctgtaatcccagaactttgggaagccaaggcaggtggatcacctgaggtcaggagttcaagaccagcctggccaacatggagaaaccctgtctctactaaaaataaaaaaactagctgggcgtggaatcccagctactctggaggctgaggcaggagaattgcttgaacccaggagacggaggttgcagtgagccgagatcacgccactgcgctccagcctgggcaacaggataatataaaacctattgtgggtggctgtactgagaatatcattaaatgaggtaatgtgtgtgaggccccaagaagagtatgaggcaaattgtgaggactccagagtggtcaacttatttatggtttcttttaatttttttttgagacggaatttctctcttgttacccaggctggaatgcaatggcatgatcttggctcactgcaacctccgccttccgggttcaggtgattctcctgcctcagcctcccgggtagctggggttacaggcgcccgccactacgcccagctaattttttattttcagtagagaccaagtttcaccatgttggccaggctggtctcaccatgttggctaggcaggtggtcaatccctgacctcaggtgatccacctgccttggcctcccaaagtgctgggattacaggcgtgagttggccatacctggccttttttttttttttttttttttgaggcagagtctcactctgtcgcccaggctggaatgcagtggcgcaatctctgctcgctgcaaccgccacctccccggttcaagcaattctcctgcctcagccacctgagtagctggggttacaagcgtgcaccaccacacccagctaatttttgtatttttagtacagatggggtttcatcatgttggccaggctggtctggaactcctgacctcaagtgatctgcccgcctcagcctcccaaagtgctgggattacaggtgtgcgccactgtgcctggcccagaagtggtcaagttataattgtcatccctatctccaggccaactcagtccagcrtggacgatggcttccatcctggaggatggactttgaggacaggttcattcatttaccagtttttttgttttgtttttaccacctattacgtgctaggccctattctaacgacttcagatacggcaatgaacaaagcagacaaaattccctacccttggccgggcgctgtggctcacacctgtaattccaacactttgggtgtccaaggcggtgaattgcttgatcccaggagttcgagaccaacctgggcaacatggtgaagccctatctctactaaaaatacaaaaaattcgctgggcgtggtggcatatgcccgtagtcccagctacttgggaggctgtaatgagagaatcacctgagcctaggggaggtcaaggctgcagggagctgtggtaacaccactgcactacagcctgggtgacaaagcaagacctcatgtcaaaaaaaaaaaaaaaagtctggccatggtggctcatgcctgtaattccagcgctttgggagggaggccaaggcgggtggatcacctgaggtcaggagttcgagaccagcctggtcaacatggtgaaaccctgtctctactaaaaatacaaaaattagccgggtgtggtggcatatgcctgtagttccaggtttttgggaggctgaggcaggaaaattgcttgaacccaggaggcagaggttgcagtgagccgagagagatcatgccactgcactccagcctgggcaacagagcaagatgccatccatctcaaaaacaaaacaaaaccaaaaacattcctaccttttaccccttggagcttacattccagagataaataagaaataggagctgggcgcagtggctttccactatgatcccagcactttgggatgctgagctgggcggattgcttgagaccaggatttcaataccagccctggggaacatggtgaaacctcatctctacaaaaaatacaaaaattatctgggcatggtggcaggtacctgtagtcccagctactcagaaggctgacaggtgagaggatcatttgagcccaggaggttaaggctgcagtgagcctcaatctcaccattgtactgcagcctgggcaacagagcaagatcctgtctcaaaaaaagataaataattgaccaggctctgtaatcccagcactttgggaggctgaggcgggcagatcacctgaggtcaggagtttaagaccagccaggccaacatggtgaaaccccatctctactaaaaatacaaaaattatccgggcctggccaggcgcggtggctcatgcctgtaatccctgcactttgggatgccgaagtgggcagatcacaaggtcaggagatggagaccatcctggctaacatggtgaaaccccgtctctactaaaaatacaaaaaaaaattagccgggagtggtggtgggtgcctgtagtcccagctactccggaggctgaggcaggagaatggcgtgaacccgggaggcggagcttgcagtgagccaagatcgcaccactgcactccagcctgggcgacagagcgagactcagtctcaaaaaaaaaaaaaaaaaaatggtggcgcgcgcctatartcccagtgactcgtgaggttgaggcaggagaatcgcttgaacccgggaggyggaggttgcagtgagccaagattgtgccactgcactccagcctgggcgacagagctagactctgtcccccgccgcaaaaaaaaaagagaagcagttgggccagtttcagtggctcatgcatgtcatcccagcactttgggaggccgaggcagaaggatcacttgagcccaggagttcgagaccagcctggccaacatagagagatccaatctctactaaaaataaaaaataaattaactgggcattgtggtgtgcacctgtggtgccagctactagggacgctgaggtgggaggtcatgagagcctgggaggttgaggctgcaatgaaccatgattgtgccactgcactccaacctgggcaacggagtgagacctcatctcaaaaaaaaaaaaaaaaaaaaaaaaaagaatggccaggtgcagtggctcactcctataatcctggcacttggagaggcagaggcgggcagatcacttaaggtcaggagttcaaaaccagccttgccagcatggtgaaaccccacctctactaaaaatacaaaaaaattagccaggctgggcgcggtggctcatgcctgtaatcccagccctttgggaggccaaggcaggtggatcacgaggttgggatttcaagaacagcctggccaagatggtgaaacctcgtctctactaaaaatacaaaaattagccggacgtggtggcaggcgcctgtaatcccagctactcgggaggctgaggcaggagaatcgcttgaacccaggaggcggaggttgcagtgagcccagatcgcaccactgcactccagcctgggcgacagagctggactgtgtctcaaaaaaaaaaaagaaaaagtgttactaagtgccaaggagcaaaataaagtagggtcgggagataggaagttttagaaggtggggagtggccagggaaggcctcaggggaaggtggcttctaagtcaaggcttaaaggaagttggggttcactgcatgaggctatctggaggaaagaacattccagccagagggaaccgcaagatgtagggcgtctctggtgtccatgctcagatccccacctcagtggcacatctgaggtcacacaggcactgaagagtagagaaatggtaagaacaaacaaataaaaaactctaaaaccacagagccaccaaacctaccaggaagcccaatttgtgcctttttttcttcactacttctccccaccattttccaggactgagttctmcaaactaaatattgccagttgttagctcatttaatctttacaacaaccccacaaggtaggaactattaattgtccccaccgtatggacaaagaaacagatacagagaggttaagtaacctgcctggggtcacatagctagtcttttccacttcctataaggccttgcagggcagtagccaggatagggcagtttaactcaagctgcgtccaaacgctgggttggctagcaacaaaaccagaggcaaataaccccatcactacctaccttctacctgaaagggaggagtttagagtatttgatttctctaagcctgttgtctcactggccattttgagtgttgaaatgagatgatacagataaaatgcttagcattatactttgcacatcataagtatttcaagcctgggcaacgtggcaagaccccatctctacaaaagtaaataaataaattagccaggcattgtgacataagcctatggtcccagatactccggaggctgaggcaggaggatcatttgattccaggaggtccaggctgcagtgagcaatgttcacaccactgcactccagcttgggcaacagaatgagaccctgtctcaaaaaaaaaaattttttttcataaatggcagctacagagaccatgatgacaatgattgtgtgtgatcttaagggccagtccagcattgggtgtctctagttctaagaagccctgacaggtctcgtccaagtactgtggtagtcagcacacggtcacacatgcatagcccaccacatatggttgtgcaggttggcaggcccagccagtggggtgaatggggactggaggcaaagcttgactttgcccacctacacagggctgctacctcctggaggaaagaaccttgcttctaattttcagaaaggcacccaggtaggatatttgtgccctagtgggtgccataaacacgtccttcgttaatatatggtgaagtcatcaggaacacaggctttggagccaaacttcctgggatcagatcccagccctgctactagctggtcatacgtccttgggccagctacctagcattgataagccataatctgacattttatttatttattttgagacgaagtttcattcttgttgcccaagctggagtgcaatggtgcaatctcggctcactgcaacctttgcctcctgggttcaagtgattctcctgcctcagcctcctgagtagctgggattataggtgcccacctccatgccctgctaattttttatattttaagtagagacggtgtttcaccatgttggccaggctggtctcgagctcctgaacttcaggtgatccatccacctcggcctcccaaagtgctgggattacaggcatgagccaccatgcccagcctattttatttttttgaggcagggtcttgttctgtcactcaggctggagtacagtggcataatcataactcactgcagccttgaactcctgggcttaagggatgctcccacctcagcctcctgagtagctggaactataggtgcacaccaccacacctggctaatttttgtattttttgtagagaccaggtttctccatcttgcccaggctggtctcgaactcctgagctcaagggatccacctgcctcagccttccaaagtgctgggattacaagtgtgagccactgcacccagcccatggtctgtcattttatttatttatttattttttgagacagagtctcgttctgtcaccaggctggagtgcagtgacgcaatctcggctcactgcaacctccgcctcccggattcaagtgattctcctgccccagcctaccgagtagctgggactacaggtgcctgccaccacgtccggctaatttttgtattttcagtagagagagggtttcaccatgtttttcaggatggtctcaatctcttgacctcgcgatccacccgcctctgcctcccaaactgctaggattacaggtgtgagccaccgtgcccggcctattttttatttatttttatttttattttttgagacagagtctcactctgtcacccagcctggattgatctccatccagcgcgatctcggctcactgcagcctctacttcctgggttccagcaattctcctacctcagcctcccaagtatctgggattacagacacccaccaccatgcctggctaattttttttttattattatttttagtagagatcgccacattggccaggctggtctagaactcctgacctcagatgatccgcccgccttggcctcccaaagtgctgggattacgggcatgagccaccgtgcccggccttaaagagggaaagtggccaggcatggaggctcacgcccataatcccagcactttgggaggccaaggcgggcggatcatctgaggtcaggagttctagaaccgccaggtccacggggcgnnnnnnnnnnnnnnnnnnnnatcttcttgagtagctgggattacaggcgtccgccgccatgcctggctaattttttgtatttttagtagagacagggtttcaccgtgttagccagggtaatcttgatctcctgaccttgtgacctgcctacctaggcctcccaaagtgctgggattacgggcatgagccaccgtgcccggccttaaagagggaaagtggccaggcatggaggctcacgcccataatcccagcactttgggaggcctaggtaggcaggtcacaaggtcaggagatcaagattaccctggctaacacggtgaaaccctgtctctactaaaaatacaaaaaattagccaggcatggcagcggacgcctgtaatcccagctactcaagaagctgaggctggagaatcgcttgaacctaggaggcgggggttgcagtgagctgagattgcaccactgcattccagtctgggcgcagagcgagactccatctcaaaacaaataaataaaatttaaaaggagggaaagctaactgctacctttcagggtagtgataaggaacaaatgaggtaatccaaataaaacactgactcttggggtcccggtgagccagtggttctcatggaggcgagtaggaggcctgggcatcagcctgtgaatgcagtgaggccccttccgcaggatgcctgacctacgacctacctgaaattcaccaactgacagggcaacacttgacccagaacctcatcagtccctggcagacagggttgttaaaactttggaatatcatccctgtttaccatcttccttcttcccatccaggagaggtgtcaggaaaatattttgggggatgtgaaatggggtatatgtggggaaaaggcctttgagtccagacagtatgagtgataaatgggaaagaagatttttcaggggatgggaattgtatgaggaactcctgatgccggacacctctgaagacacgtggcccacggcatacggaaggacaccctcaaagatgggtgacagctcccaggctttgtggagggcagaggagagggtccggagagctctgctctcaagtctgcgggcctggatctctaaataggtgccgcctgtcattaccagcgctgtgtgactttggataagtctggcttttgaactcaaaccttcaactgaaaagagtcttcaaggccctgatggtgcctgcaggggaaggtggctgcgcggtgctttctctgctgctgactgcctgagcttgcgtttcagttgtctgctcttccctttgttttttggggggtttttttttgagacggagttttgctcttgttgcccaggctggagtgcagtggcgtgacctcgtctcactgcaacctccagctcccaggttcaagtgattctcctgcctcagcctcccaagtagctgggattacaggcacgtgccaccacgcccggctaattttttgtatttttagtagagatgtgggtttcaccatgttggtcaggctggtcttgaactcctgacctcaggtgatccacccctcttggcctcccaaactgctgggattacgggcgtgagcccccgcgcctggccttgctcttccctctggacgagtctcccagcaagaggtgaggtaggagttgtgattctgccgctttttaagtccagatccctagggcatcaggtctctgagtaaggcgtgggaccaggcctcctggtcttgtggcctttccagtgccctccagaggctggagcaagctggcagttgtgtatgggtcagtggtcttcaatggttgcctggcagctgcgccagaaacccccttctaagatttatggggctggaaggatgtgaggatgtcctctcctaatttgaatatctaccagcttaggtccaatttttaaaaactcacaaattattttgatatgtaaatgagaccattgtgataaatgacaacatgcaaatctttgacttcctctgagccctggagattgggccaaagggacttgagagtgctgtgacaggcttccctgaacctatggactggacctgtgctactatattgtttggaggtgaattgggaatatgcaaattatcttgtcactgtacttctctgggcccgcagaacaaggctctgcaataatctgcgtgacctcccaggtttgactggacacagctaaacaaataacctggcagaggctccggggaggggtctgggctcacccaggtgtcctctctggccacagtactgcacccctccccacttcctgggggcttttcctctcacttccctccttgaggaccctcttctgctcctcctctaggttcccctgacataatttctgtttctccgcagaaggaagaggcccagcagaagggactcrctgagccacccccygccccactccatgttggctgtgctctcaggtgagaaggtacccagaggcctacagtgaggacaaagtagacccaaggcagcaggccagcaggggcggccattttgtctaggctggggagttctgtgaaatggctatcaggagttgtggagcttcctcctccttcccatgagagagatttgcctcacttacatctctagtctgtgacttcagaggtcatgaccccttgaccttcaccatgacctgaggtatctctggcctcttccagcctcagaagtgagttagacatactggtcttggatgctggccagacttgggtggctaagggccaacccctgacttctgtgaccagaagtgattcagccttccactagtttctgaccagcagctcctgatcctctctctgcctgattttagaagcccctgccctctgcccagcctctgagactctacccggcctcttctcccactgtctaggctggcaccatgcccccccctgcagaggtgacggacccgtcccatgcccccgccgtcctgcgccagctcaatgaacagcggctccgtggcctcttctgtgacgtcaccctcatagccggagacaccaagttccctgctcaccgcagcgtcctggctgcttcaagtcccttcttcagagaggccctgctcacttcagccccactaccccttccaccagctactgggggcgccgcacccaaccctgccaccaccacagctgcctcttcctcctcctcctcttcctcgtcttcttcctcttcttcctcctctgcttcttcttcttcttcctcttcctcttcctctccccctccagcctctccccctgcttcttccccaccccgggtcctggagttgccaggagtcccagcagctgcgttttctgatgtcctcaacttcatctacagcgcccggctcgcactgcctggtggtggaggggacggggcagctgtagcagagattggagctttggggcgccgtctgggcatctcccgccttcagggcctgggggagggaggtgatgcctgggtacctcctaccccagcccccatggccacctcgcagcctgaagaggacagctttgggcccgggcccaggccagctggggagtgggagggtgacagggctgaggcccaggcccctgacttgcagtgctccctgccccggcggcccctcccctgcccccagtgtggaaaaagcttcatccatcccaaacggctgcagacccatgaggcccagtgccgacgaggggccagcacgcgggggtctacagggctgggagctgggggcgctggccctggtggtcctgcaggggtggacgcctcagccctgcctccaccagtgggcttccgagggggccccgagcacgtggtgaaggtggtgggcggccacgtgctgtatgtgtgcgcggcctgcgagcgttcctacgtgaccctgtccagtctgaagagacacagcaatgtacactcgtggcggaggaagtacccctgccgctattgtgagaaagtgtttgctctggcggagtaccgcacgaagcatgaagtgtggcacacgggggagcgcaggtgagtgatccaggctggcgggggagcggctggaggctggcactcagcggtcataggaacaagggcggcagtgggtggggcttggggcctagaaagttatcctgaaactaggctagctgcagtaatcccagcactgtggttagctgaggtgggaggatcgcttgtggccaggagtctgggacgagcctggacaacatagagaccccatctctacaaacaatttttttttctttttttttttttttttgagacagagcctctctctgtagcccaggctggagtgcagtggtgccttctcggctcactgccacctccgcctcccaggtcccagttcaagcaattctgcctcagcctcccgaatagctgggattacaggcatgcgccaccatgcccagctaatttttttttgtatttttagtagagtcagggtttcatcatgttggtcaggatggtcttgaactcctgacctcgtgatctgcccgccttggcctcccaaagtgctgggattacaggcgtragccaccacacctggcatttttttttttttttttttttgagacagagtctcgccctgttgcccaggctggagtgcagtggcgtgatctcggctcactgcaagctccacttcccaggttcacgccattctcctgcctcagcctcccgagtagctgggactacaggcgcccgccatcacgcccggctaattttttgtatttttagtagagacggggtttcaccgtgttagccagtatggtctcgatttcctgaccttgtgatccacccgcctyggcctcccaaagtgctgagattacaggcatgagccaccgcgcccggcggcatttttttttttttaagacggcattttttttttttaagaccgagtctcgctctgtcccccaggctggagtgcagtggcgcaatctcagctcagtgcaacctctacctcctgggttcaagcgattctcctgcctcagcttcccgagtatctgggattacaggtgcgcgccaccacgcccagctaatttttgtatttttagtagagacagggtttcaccatgttggccaagctgttcttgaactcctgacctcaggtgattcgccaacctcagcctcccaaagtgctgggagtacagggatgagccactgcgctcagcctctacaagcaatttgagaatttaaaaaaaaarccatcctgaggccyctgctcaccaccactcaccggtctgcctccctccagccccagttccttcagctgaggttttttttttttttttttttctttttttgacagagtctcactctgtcgcccaggcgggagtgcagtggtgcaatcttggctcactgcacctcacctccagggttcatcagctgaggtttgttagggcctctttgtgccatgtcctggcttgctgctgtggggaaggcctagaaggaaagagaaaactcccctcaccagaaaggactgtggcagcacaggcatgtccgggagtcattacactattccgagcagggccttgtgtttccacgtggtgtccctgttcgtaagtcgtttccccattctgccatttgggcttgagaagaaggctccgtgagttaggctgcgtcccagatggaatagctgaggcctagagtctcacagccagtggaggcactgagctcagaygggcaccctgcactgaggctggcctggtgagggaggcagcacaaggctacgggagtcacaggtttgagtgcagggtgtaggaggacctgggaggcttcagggcccttgactcaagtgcctgtgttcctgccctattccctgctgtcctgacccaggtaccagtgcatcttctgttgggagacctttgtcacttactataayctgaagacccaccagcgagccttccacggcattagcccgggcctccttgccagtgagaagacacccaatggaggctacaagccyaagctcaatacactcaagctctaccgcctgctccccatgcgggcagccaagcggccctacaagacctacagccagggagccccggmggctcccctttctccaaccctcaacacaccggcccctgtggcaatgccagccagcccgccgcctgggcctccacctgccccagagcctggccctccaccctctgtcatcacttttgcccacccagccccctctgtcattgtccatgggggcagtagcagtggtggaggggggagtgggacggccagcacaggagggtcccaagctgcctcggttatcacttacactgctcccccgaggccacccaagaaacgagaatacccacctcctccccctgagcctgcagccacacccaccagcccagccacagyagtcagcccagccaccgctgcagggccagccatsgccaccaccacggaggaggccaagggccggartccacgggctggaaggactctgacttacacagccaagccagtgggcgggattggtggaggtgggggtccccccacaggggctggccggggcccctctcagctgcaggctccacctccactgtgtcagatcactgtgcgaataggggaggaggccatcgtcaagcgccgcatctcagagactgacctgcgtcctggggagctgagcggagaggagatggaggagagtgaggaggacgaagaggaggaggacgaagaggaggaggaggaggatgaggaggaatcaaaggctggtggggaggaccagctctggaggccctactactcctacaagcctaagcgcaaggctggagctgctggaggtgccagtgtggggggcagtgggctgccccgaggccgccggccaccacgttggaggcagaagctggaacggaggagctgggaggaaaccccagcggccgagagcccagcgggacgtgcccgcacagagcggaggcaccgatgcggggactgtgcccagaccttcaccaccctgagaaagctgcggaagcaccaagaggcccacggtgggggctcccacagctcccgggccggacggaggccctccacccgctttacctgcccccactgcgccaaggtgtgcaagaccgcagctgccctgagccgccacgggcagaggcatgctgctgadcggccckggggcaccccaacccctgtcattgcctattccaagggcagcgctggcaccaggcccggggatgtcaaggaggaagccccccaagagatgcaagtctcctcatccagcggtgaggcaggtggcgggagcactgctgctgaggaagcttccgagaccgcctcactccaggaccctatcatttcagggggtgaggagcccccagtagtggcaagcgggggcagctatgtatacccacctgtgcaggaatttccactggccttgattgggggcggccgggaacctggcggtggcaggggaaaatctgggagtgaagggccagtgggggctggtgagggggaccggatggaggggataggggctgccaaagtcactttctaccctgagccctacccgctcgtctatggcccccagctccttgccgcctacccttacaacttcagtaacttggccgctctcccggttgctctcaacatggtcctacctgatgagaagggtgcgggggcccttcccttcctaccaggggtctttggctacgcagtgaatcctcaagcagcaccccctgccccaccaacaccacctcccccaactcttcctccaccaattccccctaagggagaaggggaaagggcaggggttgagagaacccagaagggcgatgtggggtgaaccctggggctcaatccccctttcaccagatgccaccctccctgaaccccccaccactaccagctccctggcctccctgccccttgggagccccttcacactcttgtgcagggacttgggggcccctggagctcaggggtcaggctgctttgtgtgagatgtagttttcccatctcctgggaagggatctttcgaggttcccctctcagtcttcctccagggaatggcctccatgaggggcagggccagcttccatcccttctccagcccttggggcaactgagcaatatacttaacctgaatctctactcacagcccccaccagctctgaatgtctaacctgctcccctgattcgtaaacctaggggaaaccatctctctcacctaatgacccgccttgttctgaagctttctctaagcccttcccagttgcttcctagcacattccattctttgtggcccagggcctggaccagaccattgtgatacctgaccccgcccacctgggagtgtggctttgggtttcatccttccccagcgtgggtctctacgtccctgtttcccttgtatcaagacaccttcctcagcttccatgcctttggatcttccatgttcctccccatattcctggacttcggagatggcctctcccaagccaggtcaaggaggtttgggggagggttgcccctctgcccctctgttctgtggctgagcactttcccagtccagggcagggaaatattggccctatcttgacccccaaatccagtgagctccagattcttccaaggcaaaagaggtaagcagatcacacctctttctgcctctacatatggcctattctgggctagaccagatttgggggccaggagggaagaactccatatgggatggagaagggaatctactttctccctgtttttttttcctgatggtttctcccagactagaccaaatagccagaaaaatgataggggtcggwtgggtgggtaagcccaggatttgcacatgaccttccatccttacctgtattcccatctccccagtgtcactcccctcaccaatcactccagatggttttgggggaaccattctactcttctggtgggctttggggtatccccaccaactttcccttcaaaatagcaccttacaccccatctttgactcagttccccacacccaaagatcccagcctagggatggggtacagggactttaaatagtccctaatccctaatttgcactagttaaccctggtcagggtccctgtatttccttccagtgggggagataaatgtttgctcctaattctctttgaaaactgggcctccctgctctgtgattggataaatatttcccatcccacccacctccccccaaaaaatagctcacaaggggagagccagtatgggggagcaaatttgacaaatgggaattagaggagtgcagttttaaaaggaaaagttgctgtcatcaaaatggcagccttttccccagctactgtttttggggccaagatggctgccctagcagcaatcactgccaagggcaagatcatggcttttggagggaggtgagtttagggagggccaggaccatcctcctacccctcataccctcccagcatatacaaaaggggaggttttagacaggctccctgaatgttaaccacagaggagtcactccttcattcctcctctgtctctttgcacttttcttggtcttggccacagcctgagtgacgaatttcctactgaatgtaccaagttccaatttttaagsgggggaaaggtttcaaatggggaaaaacacacamaaaaaaaatcactaaaaattcccacaaatcttgtttctggcactttagaaaaactgcaaaaaaatacgtaataaagaatacatatatatatatctacacacaaattatatatctatctatctatacagcggaaccacaagagagactgaggaaggcctggaggcaggggcagaggtgacgacagtgcccctatatccttaacccatactcctctgaggcaaacaggcatgggaaaatggaagggttgaggatggaccggagaattggaacttcagaataggtcaaaattccaaaaccatggacatttttttttgggagaattgagattgtwgacattttttttttcttaartatgatcaaggaaaatagcttccagaatgtggtggttctgggcaacaaatgagattgtggcgacgtggagattaaaatatatgtatttgagctggggaatttgaatattgtgagtttcagatgttggaaatttgggattttgcagttttgtcttttgaaaatgatcaagtcttgtcagttcgtgccctctttccccatgttccctgggaagacgggtggtggcagagtgagaaggccactggttytgtgccgcagcacgcaaaatttagaattctacagactagctctatacgtagtgaggacccagatttagagaaactgaccaatatttatctccgcatttgtgtgtgtgtccaactctgtaggccaataaaccaacaagacaaatgaactgtgctccacagtgggatgccaggtgcaattatttgcgtggctggtgggtctgggggaaaggaacatgctaactttgtcccacaaggatccctgtgagttgtggcccaatgctccctgtttggacgcaacttccagcagttgagtagttgagtgagggcttgttgactgtaggctcaagctgactttggcccaacatccagccagaaatattaacagtctagttcatacaacctgctgggcgcgagatctctatgtccaaaatggccctgccttaaaccaggtctaaccttccttccaaattgaaagaaaactgaggcataaaatgtgtgatggccataagagacacaacctttctttttccacttgtggcttccccattggcttcaattcgttgccccctgtatcttttctagtgttacggagggatgggcaggtaaactaagtgacgtgggtcaggtttacaggggctttgaggaattatggtatgaataacttgaccagagtggcagccactaagctctacacaagttgttgccaacaggggaatcaggcctggtgttactatagttttttgttgttgttgttgtttgagatggagtttcgctcttgttgcccaggctggagtgcagtggcacgatcttggctcgctgcaacctccacctcccaggttcaagcgattctcctgcctcaggctcctgagtagctgggattacaggtgcacgccaccacatccagctaatttttgtatttttagtagagacggggtttcagcatgttggtcaggctggtttcgaactcctgacttcgtgatctgcctgcttcagcctcccaaagtgctgggattacaggcataaaccaccacgcccggactactatagtttttaaaattatctttgaggctgggtgtgatggctcatacctgtaatcccagcattttgggaggccaaggcaggtggatcacttgagctcagaagttcaagaccagcctgggcaacatagtgagaccctgtctctatagtttttttttaaataagattattttcaagagaagccaggaagccaaatttctcatgaaatatccacattttaaaagcagtgaactagtagccaggcgtgatggctcacgcctgtaatcccagcactttgggaggccgaggcgggcagatcacgaggtcaggagttctagaccagcctggccaacatagtgaaaccccatctctactaaaagtacaaaaattagctgggcatggtggtgtgggtctgcagtcccaggtactcaggaggctgagccaggagaatcacttgaacccgggaggcagaggttgtggtgagccgaggtcccgccactgcactccagcctgggcaacacagcgagactctgtcttgaaaaaaaataaaaaataaaagtagtgaactagttcaaatttaaaactgtgcaggccaaacaaaaaacacaccgttgcaacctctgatacatatcgcatagtgcttttttcccatctcctgtgatccccagacaatcctatagggcatatgctatcattagtttcattttacagatgtcgaaacaagtacagagcaagctagtggcttgtgtgagcaccaaggctggaacttgaatgaaggccttcaaaacgcttgttttttctcattaccaatgcatgcttgtagaaataactttttttaatcccagagatagtacacattacaaaacataataaattacagaaaggtaaaaagaaaacgaccacaagacccaacatgcaaacaataagcactactttatttctatttttatttttttagagacagggtctcactatgttgcccaggctggtctcaaactgtgggtttcaagtaatcctcccacctcagcctcctaagtcactgggattactggcctgagcgaccatgcccagcttataaacattattaattgctgtatttacttccggaaatttctttcccctattcaacaaatgttaagcacttactataggtcagcacctgtgcgtggcactgggcatgctgcagtgaacaagacacttttttttttttgagatggagtttcgctcttgttgcccaggctggagtgcaatggcgtgatcttgactcactgcaacctctgcctcccgggttcgagtgattctcctgcctcagcctccctagtagctgggattacaggcatgtaccaccacacctggctaattttgtatttttagtagagacagggtttctccatgttggtcgggctggtctcaaactcccgacctcaggtgatccgcccgccttggcctcccaaagtgctgggattacaggcgtgagccaccgcgcccggccaagtcacatttcttgacctcataaggcttatgatctagttcctgttctgtgttctatttcactggcgacctaggtgttgatacccaaaagagcttcttcaagatcccaaagagtaaatcagatgatactgcatttcaggtgggtccaagacacctgcctacccagccctcagtccaatgcagtccccagaaacgaaataagaggcccagattcctcgtgaaggagttaagaggcagagaaggatagggcttgacagtatcaccaaactctcacttcaactggcagggggcctgggtctcaaccctccagtcttcaaggaaaggggtctggagggggcaagtggtacgtggcgtccaggaagatgactagggtcccaacgctggtgaagatgatgaaagtccacaggaagaggcggtccactaccatggccacaaactgccagtcctccttcagctgtgggtaggcaaaggaaacttcctgagctctgggcccagacccccagggaaacccccccatttccccgcccgctacccgcttgagtcctcctaccactggtttgaggcaacagccggcagcgccaacaggagagcgagactgcaggcaatgcatgggcataaagaaccagtaggtaagcagggggtgggaccaaatgagggagaggtccaatcagaaacgaaagcgaggccgggcgcggtggctcacgcctgtaatcccagcactttgggaggccgaagcgagcggatcacctgaggtcaggagtttcagaccagcctggccaacatggtgaagccacgtctctactaaaaatacaaaaattagccaggcgtggtggcgcgcccctgtcgtcccagctactcggcaggctgaggcaggacaatcgcttgaacccgtaggcggaggttgcagtgagccgagatcgagccactgcactccagcctgggcgacagagcgagactctgtctcaaaaaaaaaaaaaaaaaaaaaagccaaaaaaaaaccacacaaaaaaaacgaaagcgagtgctggtgcggaatttgggggtggggccaaggtcgcctagacctggccttgttccacccccgttggacataccgcatcgtggtcctcctgttcctgcagctgtcgagcgatgtagctgatagaggagacgacctcccgtagctccggaagcagggccacagcccggtttggaccatcgataaatcgccgcagatcaggggcagacagttcaggctggaacctggaagaggagtgactggccacgcccaaacgcaaagacagccagtgccggcgacccaggccccgctccagctgcctccaacaacttgccagttctcaaaacccgagagcccatcatgcttttccctccagcagtgatctctctagccttgtgcaacttcttccaccgcctctgttttagttcccacctcccctcaaagtgagcagcaggagtactacaactcccatgatgctcaaccacagcgtcttccgggagcatgggccgcttcttccgcacactcttctgggaactgtagttctccctctcccttttatgtgggtaacgggcgtagtcctacctattgggtttggggaagagaaaatcacttggcggcttccggatgaaatattcatctgttccccgaccccagccacttcctggagaagaacagtgagggggctccggcatcaggtctctctcgggtttgggcctttttagacgcaggtacagcggaagtttgtgaatgaagatctgcagagtagaagaggcgtattggtgggggctttcatgctttcagaccagaagggaaacagccaaccaccccactccacatgcccattcccgcgcgtgagtatgtgcgtgcatattcttccacaaacgagctacacaaggaaatgcagccacacagacctaagagctctttagtgggttgggcctgtcgcggtggctcacgcctgtaatcgcagcactttgggaagccaaggcaggtggatcacctgaggtcaggagttcaagaccagcctggccaacatggtgaaaccctctctctactaaaaatacaaaaattagctgggcgtggtggcgggtgcctgtaatcccagctacttgggaggctcaggcaggagaatcgctggaacctgggaggtgaaggttgcagtgagctgagattgtgccattgcactccagcctggccacaagaacaaaactccatctcaaaaaaaaaaaaaaaaaaaaaaaaaagctatttagtgggttgggaggtatcccaactggaaagagagggcttccaatctgatagtacctaaccctaagaatatttccctgggacccgagatgggcagtattgatgaagagagtatgggatctgtgaaatgataatgatgggggctagcttaactgtgcaacatttcaacactcaacaagcttggacacttcaacactctgccacatagctatagttctccctatggtctgtaaaaggaaaattggggttggaggaggagatctttcttacctgacggacccaaaggggcatttggtgggtgtggggtgagcggtggtgcaggttgagaaccacgacactaaggatgactgagaaggtgacgaggaccatggtaaacatgaggtacttgataataatgggtactgatagtgaggtctcaggtactttgtcagccagcagcagcaggaacacagtaagggtcagcagggcaaagattgagagccccatcttctctccttggagggcagaggggaagagagaaggattagacttgcctgaaggaaagctctatggcataatcagtgaccatgtttccaggccattcaaagacagatttctacagccaggcacagtggttcacacctgtagtcctggcactttgggaggccaaggtgggaggattgcttgagcccaggagtttcagaccagcctgagcaacatagggagacctcttttctacaaaaacaaatttgaggctgggtcttgctctgtcacccaggctggagtgcagtggcatgataatggctcattgaaacctccacttcccaggctcaagtggtcttcccacctcggcctcctgagtagctgggactacaggtgcacgccaccatgcccagctaatttttgtactttttgtagagacaggatttcaccatgttacccaggctggtctcaaactcctgagctcaagtgatccacccaccttggcctcccaaactgttgggattacaggcgtgagccactttgcccaacctctacaaaaagaaaaaaaaaaaaattagccaggcacaatggcgcatgcttgtggtcccaactatttgagaggctgagttgggaggactgcttgagtgtggaagatggaggctgcagtgagctgtgatggcaccactgccttccagcctgagcaacagagcaaaactccatcataaaaaaaaaaaaaaaaaaaaaaagacaggcttttggaagggccatctgcatgtaaatcattcctacatttgtatgtccaccctggacttctcccctgaatgccagatatatatccatctgcctactcaacctctcttggatagttggatgtctaataaatatttcaagcttaacatgtccaaaactgagccgggtacagtggctcacacccgtaatcccagcactttg

SEQ ID NO: 97349 - DNA, 26833 bp, Homo sapiens
  misc_feature (1)...(26833): n = A,T,C or G
taactgacacttagccttccttgcctcctcttcgccacaggagaactctgcaaactcccttccagagacaataactgcaaactatacaataggaccacaatttcctattgtgcagggatcctaggacaaagccacatcccaaatacttgctgagagcagtggctacaaatgttaacatgagattagacattgagatggtccctttatattgagagaacatggactttggagttgggcagacttgaatttgcattctggctctagtggttactacctagtgtggctttgagctattaaactttccaaagtttcgaaggacttatctgtaacatagtaatggtaatccaccttatggggtagttgtcttgaagaggctatttgggaggctgaggcaagaggatcacttgaggccaggaggttgaaaccagcctgggcaacacagcgagaccctgtgtctacaaaaaattaaaaaattaggcattgtggcgtgcacctgaagtcccagctactcaaggcagagatgggaggatcacttgtgcccaggagctccaggctgcagtgagccatgattttgccactgcactccagactgggtgacagagcaagaccccttctctttgttgggggcaaaaaaaaaaaagagggtatatgaagtacctagtataatatctagcctgaattgcctataatgacgcacttcctttctttcccttgggtttcagctgccaaacactcttctacaagtaagataagccagctttgtatggtcaatgataaacatttcctatttctttgtaaatcccatcttcctgcagacatctcatttccatcattgccaaaaaagtccttccatccctcacccctgtagaactactctctcttaactatcaaacagttctgcctgaactctgactatcctcttctacatctccctaaaccaaggtacttgatcttcttgtatcattcccaaagattaattcactaattttctcagagcaaactgtaatgaaggcagggaatagggcctttacacttcagaagggcacaggctagctcctggagaggagtggagatctgggtccaggcacccctcggccccaccacttttcctcaaggcacagaaaaagccaaactcgaaatacgtcttgagtctacacgagtgtacatctccttgcctacaactccgtgagatcatcattgaagtacagaagtattgcaggtgtgtgaagtgtaccgtccatactgagatagtcaaattcttcctcctcatcccggatcccattctcttccagggtaaaatccatgttcaggttcttcccttcatatttccacgtgtagctggcagcatgtgagttataggggagatagcggtgtaggatttcccatatggactccagaacccccacctggagaacacagaagcaccccacccccagaattctggatggagtatacatatacacacgctgggatcaaagtgcctcccttggcagatagcagcttcaggtactctacggccccgggaaaaaaaagctgaaactccagcatgcaatgagcagaccctaaagtcctacagatcttaatggcagccacttctaactaccggatggccataaagggtcaactgtcccctcactatatccatgcaacagagtagattaaaaagaaagtccaattgctgtccaaaacggcgtgtaagagcttcgaaggaccaccatcactaagatacatgaactgctgttcccaggcttataaaggagtctcttgtccccctgtgacccagacactcctagaattcccaaccctggggacctaggtgctgtgctttcctcagttgcctcaatgtaaaggacagaaaatacactcccaccggttatggaaaaaatgttgccctgaagatcggcctggagatttgctgggattccccattccttctaacctgctccttgtcaccagttctcacctccagtgtgtgctcctgcgacgtgagcgtgttaatgatgcggatgctccgggtcttggcagacagccgccccacctcataatacgacccctgccaccagggcttcccaaaatcgttggcccagtccgaacagggcagctgaggcggaacgtgcacaaagcggccccgcggggtgcagtacctcaggcagccggtcagcggatctatgtgcttgcgaatctttaaaggagggtttggggcgagggtgtcagagcagccattaggctctggctagcctccgcctttccttcccatccccgctctccatttcctctacccacaatcccaggttccagcataactcacgtctctggtctttggatcaaaccagtggctgatatcctggcctgcaacttccacgatgggtttcagcagcaggttcccttgaaaagagcagcacagccactgtcaatgccagcccttcgagaaccaggcaaacgcgcgcgtgcacacacacacactccggccccggcccaacgtgtggcccttacccttgtattcctgtgccaatgacgttaggtcgtacacgcgtcccaggtaagatacccagaggtcttcgggcctgttatgttgggccacctccgccggcgtgaaatagcgacgctgaaaatactccaagtctggcccagccaccaggccccggcgcggcatggctcttgctctgtcggtcactggatctcttggttactcctttgctcctcagcacgtactcactactactacgacctccgtcgcgtccgggagccgaggggagagcgtttatccgctgacatggaaaccattgtccttttccggccaccgtccactgagataaatatcaggggcggggtttggactgcacgtgttcacgggaaacgtagtatgagtcccgcgtggggcatataaggatcaagtaattgagttgcgccgctttcaggagttgcggggtggggcagagaacgaatacgctccgttttaattcagtggcctgggctacatgggatatttaggacagactatctctctgagacagaaaaacaagggaggaggcagtatgaaagaatgtattctcgctaaattccagtttctaaaggatgtgtaagaaaccagaggtaaaggtctcgcgatatcttaagacatccggcgtagtacgcttcagtgagccacagcgctagagaagtaggagaagctcgcgagatctgtgccgttgccgaggagactaggagggggaggagaggggatctcgcgaaaggaaagaggtcgggagcgctcgcgagatctcggaccacccaacctgaaaggtgcttaggaagttgaaaggcccagaggaggcctccgggcaaatggccggagctggaccgaccatgctgctacgagaagagaatggctgttgcagtcggcgtcagagcagctccagtgctggggttagcacgggctctggttctgggactgaggggcagtcaagcagcaagatggagggggtggggaactgcagctcccggcagcctctgggctttgtgtgagtgccccgcgggctgccgggagctgtggttccgcgggcgggcagcctgggctgcgcggtctgagcgcttgttacaccccgcgcaggattcggacggagagcgcgaggactcggcggctgagcgcgcccgacagcagctagaggcgctgctcaacaagactatgcgcattcgcatgacagatggacggacactggtcggctgcttcctctgcactgaccgtgactgcaatgtcatcctgggctcggcgcaggagttcctcaagccgtcgggtcagtgcccggggaatgcacacccgcctggtaatgtggcggaaccttacgcaaggcatttccccttaagggcctggctgcaacccttgttttctggggctcgttttcgtggctcagaggggcgggactgattctggcctactttcctgatgctctgatccttctttccagattccttctctgccggggagccccgtgtgctgggcctggccatggtacccggacaccacatcgtttccattgaggtgcagagggagagtctgaccgggcctccgtatctctgaccacgatggcgcttacctttcagacttcattaaacttatgaccgaatgggcctgtgtctgtgtgtagctgggatgccggtgcaggatagcacaccccatccctagaggaaagggctcatctgaagtcgggagcaccctcaaccctcctctcccaaccaagatgtccaggggtgccaaaggttctctcaagttcaggggtagagatggggggcagggctgaatgacggaccaacaggccccagggtgggcccctgcatcttccctcccacggctgctgctccagaattgtggcgggagggggtgtcatcctgctccggaaggcccattgtttcccaccccggcctggcaacaccgagttcctctaagctggggtcagagaacgggctcaggtccccaaggggagcagcggcaggcggccgaggctgggcccctccactctattgagggggaggtgcctggggtcaggaacagatctctgaggtctggccaggaagaacggacaaaagcgataaggccagggggctcaaggatgctcctctctgctcatttgtagccctggcacatgtttcctgttcctcggcacagggcaggggtgatagtacttgtgccacgcctctgttcgcagagcgcgttcagttcgttaaatctttattgatgcgtggacactccttcccctccagccccgccccccagccccagaaatactagagaagctgcaccataaaacgagggcacgagattgttgtcccattcacgacggagctgagggggaggtgtgcaggttccagcctagatgttcaggattgagatgtgggtcgtgaaaggaaagtgggttttccgggatgtgggggcttttctcagcactgggtccactgacgctgctgctcccaaggggatgctaggactccgctcaggcaggggtgggggcagggcaggtcggaagatgccgggcttcaagtccttgggccgaataagagggagggcagccgtcagggttgttcttgactcgagggtcattagacccagacctttcctgatgtgggaacggcctgggaccctggtgaggcccggatttgccgcggctgcggggcgcgccgacgccgataaagggctcggctgtagggcacgaggcaatcggctaggcggaggcgcaggcagaggcggcggtagctggccagagcaagcacgagcagcggcacgaggagcaggaatccggtgaccagtagggccgtgaaaccggggtcccgcaggtgcgcggtgcaagggggtgcctgggagcgcaggaactgtgggagaagaggcgtcaggcccaagccgaccaggcgatactgtgcacggggtggaaacagcccaggcgggttgaagttgtggcccatagaccccaccgccagcatcaccacacaccaacactcacactcacacgcacaccccggggcgcacgctcacctgagagtggcagaggaagccgaagcccagcatggtgacagcgggtagcaagatggtccctagcaccagcaccagcaggagaagattgaaggcagccaccagcagattctgggctgttacaagaacagcgcaggcccaacagtccagggggtcccggggctctgggccgtcaccaggaaccgctcgctgtgccccggggacatccgccatggcccgcctggatcccgcccgcctgggccgctgcccttatagccctctttcctgcccctcccccggcccagcctctccccaccccccttatcctggaatgcggctctaggattaggcaccccccatcccgaggagcggaccagagccctggacattccacaggcgcctccggggaggggctcaccctcgccagggtctgcgcagtcctccccatcaatcacggtcttgcagccctcccggtactcaacctgctaccaccagccgttagcgaaacaggattttttttctccgtttatttttaatattaatattctcacacaaaaatcaccgaaaataggggtagggttgggaagacccctctgcccctggggcaragagacagtgcagtgcgagggtgcgggactgtaaaccccccacccctccgcagccccagcgtggagaaaaaacaaccaacaaaacgaaaataaagccccagagaaactcaccccggggtgtccctgccccagtgaggccctggccctgggttgtttcacacttaaaaagaaaagggggtgggggtgaaggtctgtgttttttaaagttggccggggctgggaaggacggggttccttttcctcatagttctttctttaaaacctttaatttttttattttatttatttttttttacaaaataccatttcagttcccacttcttcccctacagtacaggagttgctcaccctcaggtggggctggggtcgggtcgggagtggggggactggtccgagaaagtgcaggacgtaggggaggggagcgggtttgagcaccatgagaacccggctggagccgcgggcggacgggtggagacggtcgggccgggcccggacacacactggggcgcggggagagcccggcgacgggcggtccctggaggggcgggcaggatggcttgggggtgtgggaggtcgggttttcccaaaaatgaataaatagaggtgagtgggactgttataaattaaaaacaaaaaaacaagaaaagaacaaaaaatacaaatcataaccaagtgaataaagagacatgtacaggggtcacagctagcattggaagtaaaaaaggaggttccgggggaggggtaaagcccatagaaagaatctcattaaaaacctcggctgccgtaacgtctatgtacatacacgagccgcgtgcatctgcgccgggcgggcgggcggctggcagggtgagggaacccgtatgtgacccccgccgccgccggagcctggtccttgtgtctgttgctaaaaaggccaaagtcggtgaggggaggcgctggtgggcgaggggctgccagccccctcccccgtctcccattttttttccttttttcctcatatttgctaaaaaaaaaaaaaaagtttttcttaataaattaagtgaggggagctgccaatggggtggaagggctgggcccgacccccttctcggccacaggcgggacctaggtccagcccaggcatgtgctggtggccccgcggcgccttgcgcgggcaggcaggcgggcggggcgtccggcctcatcgcgacgtgctggctggggcctggggggagaaagccggcgggggctcagggaaaggcgcggccgggctcccgaagcccgtccctgcagcctgccccagtgccctcctccgctgcccgcgcgcccgccgggccctcaccagcgtgaaggcgtcgtaggcctgagccagctcctcagtgcggtactgctccagcaccaccacgccctgcaggcctgcgctgcggcgccgggcacagccctcgcagtgtaccaggtacgtgttgcggctgccattctcacttgtcacgaacaggatgttaaacacctccacctggggcagggaggacagtgcagtcagggggagggagggccactgtggacactcagggagagcagcagagccggcccactcacatcgcactcgttgcagtagtaggctggctcgtccttgacacggccctggtaagcgattttcttccctgcccgcaccaggctctcgcgttgcacctggcagtgcttcatggactgcagcaggcagaacctggggagcagtggggttgtgttgagaccaccggcaaggaggaggcctgaggcagggctggakcaagggcagaggggtgggcagccccagggccctcccctaggggcctccccgcttcatgtctaggtcacatyctctgtcctgggcatctgttataggcgaagtttcctgtggcttttgtctatttggaccactagaaaaggtcatgacagcaaggacctagttagcctccccaacacagtaacactcggggcacaggcagacaaggatggagagaggtaaaaagggtggagtcagacaggaagaacaagaaaagggaccagtcagtggaggtgggctcccacccaaatagggtcctcacttgatcatcttgaacaagtcggggtcgctgattttgaccgtgcgagccacgttccatgacacgtgaatcatgggcacgatggatttgacgttcttcacctcattccactcgtatcgttccagggccagctggtactgataggctgcgggccaaaggcgatcacaacaggactctcaaacagcccccagcctcccaggcccttgccgctgaggcgccacaccacgccaacacctgccccaccctctcaccggtgaggggccccacgttccaggcaatgttgttgcaccagccggtggcctgcacccagtgcacagtccccgcattaatccacacgaggtctccgggtcgctgcacgaagcggtacacaggaatattggatgcatagagatcatccaggattggccaccaggaacccgtcaagtagtccacgccgtgcctgcggggtggccacaggtcagrtgggaactggggaccgagggcggggacgcggcagtctgacttgcgcaggacggcacgcaccgatcacagaaagcgctgatggtctcccagtagtgctcgtgcaccgcgaaccactcgcagtcgcctgggccaatgttgatgttgacggagcagaagttgttattctcctggtggcctgcaggggtcgacagagaacggcatggctggccaggtcggaactgcgatccccgatagccccgccctctgccctcattggctgacggctgagcgccgccgccagcccctcctctcgcgcttccagcatcagcgcgcacaggcgtggagcgcacctggcgttcggctgccgggcaccttcatgtacagctgcaccgtgttcatgcccaggatggtgtggcccacgtggctcagcatgttgcccgtggatgttacccgcatgaaggcgggcagcttyagcagctcctgcagctggggcttccacctgcggtgcggaagtgcgacgagaggctacaccccgcccccgccacgaggtcctagcagcactcctgccccaacttccctggcctcagccccactgaccgcttagcatcagacaagtcgatgttggtgccaaacttgatgatrtgatggttcttcgggtctggtgcgctgctgctggggcgaagagcacaggttggtggagagcagagggaggggaaggaagcaggaacagaaggggcacacctkcacagtacctaggaggrgttccagtggtgctgtctggctcctctgactcctcatcctcactctccttctcctcctgttcagccagagggtaggcaggcctgggtcagagacctttcgagagccctcccaccgcagccccgtcccaggacctgcctctggccacgttctcrtctcacctgcagagactcctggaaggatgaggcctggtactgtgcgtacttggcaatggtggtgtgggaacgggagctctcacaaggccakatctgccgagtgcctgtcagatcccagttctcatctgagggctgctgcacctgggtgcgaacttccacggtgtgttcgccactcgcttccaccagggtcttggtggagaagaggcccaagtctggaagggagggccgagcagggtgtcggggcagaggcagaggatagggaccgaggacccaatcgaccctttcccttcctactcctctggctctgacagggtggtcataggtttagcagagctcagcccagaagaaataggcaggagccctagccccacaggaagctgggagtgctggcctctatctgcatcctcaccagccctctttctcctgcagctgctcaaggactcagcccctagaccagtgttcccagatgtgtgcgtggccatgtgcaccgcacctgacagacacatagtaggtgctcaatgaatggcagcttctttttttccccatttggagtctagtcaaaacagcagcttctttgagttaccattggatccaattaaagattaaagattcagtcaagtgaaagcctgaaatgtgcttcaaataactcagtgtggggaagggagaacatacaggtataaaggagacaagattgacctttgtatttctatacagctttctctaattttgtatgtgtttgaaattctgcgcaataaaagactgagagagagccccaacatcacagattttcaggggttttctaaaatctgtattattctcttccttaatcaccaaaaaattcagaaatgactaatcaggccctgactatggccccttctcccttgccaaatgctggagacagacagatgggagaagagcccaaggccagcagacccatcactcagtggactcctcacggccactgtcatgagtcttcaagtgtgggatttctcagagggtcctacatgccccagacccttgtagccctccctaacactttctgccccccatactcactgagccgcagggagcccgccaggccccggatcactgtgatgggatttcgagggtctgtacagaactgcagcaggacaggtgagaaggcatcccgtttgctctccagctgagacatgaccaggagagctggggtcagagccctggcccaggctcagagcaccccagcagtccccaacactgtcttagaaccctctggcaggggtggttctgaggccaagtggcacacatacatagatgctgggtgtaggggggttgagtttttcccggggcagcttctcctcagtgttgatcttcggtttcacagactgggcaggggaaaggtaggactctcgaaacttccctttcaccttggcattcctgcgggaggacagtggaatgaagacagaaacatcagggtgatgggggaagggagcctgtctccgggacaagcaagcaggcagccgactcacctgctggcgcgcacgacgtcagcagcacagtggctgatggtgaggtctgccatgcgcagccgccgctcttccacctcagaggcgataaaggtctccttgtcaccactctctaccttgatgagccggatcttcagctccttggggggcccctcactaagtgagcgcagcttcagcatgtcggcccggctgacacccggtggccctggggcttcctcccgagccttctttccagggacagaggctgacgggggtgtgggctgggcagaaggtgcaggagctgatggaggggctggagctgtgggtggcttggccttggaggccccgccaagatcgggccgggacttctcacgaccctggatctcctcgctctgcaggtccaggttccccagcacccggcggctcttttctttggggaccttggccttggcctttgccctgccctcacggggccgacgacccacactgtccttacaggcccgcctgtgccgccgatgctccttctgatgctccttctgtcgccgctkacagctgcctgacactgccgccaccccgccagcctcctccttggcctgtgcggggggcagcagtcgctcagtcccactgtccgctggctctgctgtgtccactgggtcggctgggtcagtggcactccggcccacccgctccacaagggtctcgcaagcccggctgatctcttctagcacctcagactcagagcgagcagggggcagagataggggtgggggcggttgggtgggggtcatggggcccgggactggctcttcgcccgccctgcgctcccgggcccagggcccgcctgaggtagagaactgagatgacgaggaagcagagggctgtggggagccctgggcgctaggggccgctgaggtgggcggcagggcggtagcacctgatggggggccaggggaatactgagtggtgggcaagggcccaggccgggtggaaacagctgctccagtcccccgataacagtacttttgtccctccagcacggaggccaaggatttgagcaggctggccgggctggggggtgggggtggtggtggctgtggctgagagggtggagggaacttggctagaggcggtggtggtggtagggctggtggtggcttcttctcctcttcctgggtggccgtggtggtggtggtggtggtggtggtggtggtgacggcgacagcaggagcagtagtggtgggggctgtgtcggtggggaaaggagactgcagagatgcaaagggctccttcagcgggggttggggggccacgcctgcttcgtgttgttgctgttcctcttccttgcgaatggattcgtccagcatcttcatgatgttggccagcccatcaggtaggatcttgaattcggctggctcctcaaactggtcctccagcggagtggggggaaaatcaaagagtcgagggcctcgggcaggcagctccccaaccccrggcggcacaggctggggggctttactcagggggcctgggggtggccccggccccacctcgggggtctttgggaaggagaccctgggccgggggctctccgggcgcctgaagcttcctgaggtattttggtggcaggaggaaggaggggctggaggcagggcaagagtcaggggtacaagaggtgggtcctgkgggttctgtgctgggctgggaggccggggaagggggtctatacttctggccagatagggtggtgggggaaaggacacaggcccagcagggctgctgctgtggctgccactgttgctgttgctactgctggtggttggggttgggggagtgggaggggtgtgagaatcctgagtgcccacagaaaagcgggaggccggaggccccaagaagccctcgcgatgggggaggggtggtggggcagggcgggggggtccctcagtcccaaagaagagctcttctaagatctctccatcctctcgggctgcccggcaggccggacccttcaaccaggcagggggtggtggggggcgtaagaggcggggacaggggggtggagggggtgaggaaggtccaggtggcagggataggtggggagtggcagcgggagcccccaagaacggtttccgactgctgtgtgccgagggccccaggcggccatggtgagagacctccagcgcgggagtttggtaatggtcagcgccgggctgcaagtgtagaagcrggtggtaggagcattgctcgggctgcctcaagacaagctccacccatccccccctccaccctcagttgtcactcacaatgcctgggttcggctccacgccccggagaccagtgttgctgctgctgctactgctgctgctggtggtggtgccggggaggccagggggccgggaaggggcgtaaggcacgcaggcggtggttgctgctggtgaaacgctggagtccatccgcgacctctgaactctgctctctctaaggtcacttccggggggacgggtggcaggcaggcagccatggctctctgctcctggggggcgggggcctgggcctgggggagcagccgggaccagccggtggccaggggggtgcgcggtgtacgctggagctgggtatggatatgggtgaggcagcragtgccgctgctcctatagragataaacagggatgcaggatgaggaatagagagcgtgggacttgtaggtgagaggtgaaaggcaacaggcaggggctcacctggcgctctgggggtgctgaacccttgcgctctgggccccaggcatctccatgcagggtactccacagccctggcttggttagctgaaatggggggctggtrgccaggccaggcaggggtggtggtggtggtggtggtggtggtggtggtggtggtggtggtaatggtggtggaggcagtggcagccctgggggaaggccagtctaggagagaagagagtgtgagaatcccattcccaagtcctgcctacttactgcctgctggcccccctatacccacacctgttcagagttgcagcctctccttcgcttgcctccagggctgaggccctcctcccctgaggggcctgagagtgctgcaggaggcacaggctgcaccactgggggttcagcagctcgcttcaccgggggacctccccgcttggctccatagttccgtttgtgctgagaacaaaaagagagaagagaaaatggcacgggtgcaggcacagcctggctctcctccctaacccacccagtgccagcctcacctcaaggtgtagcaagttccacacttgctccagtgggggcaggaccttggctcggtgctggcaggagccagtatgaaagttccagagctgggcctgggggtggggggacacggggcaggggcagatgtcaggtggggcactgagccagaaggcacaatcgtacaatcccgtcccccacgccctgccttctcctacctgctgcagtcggccaatgcggggccccagctcagcgaagcttcctccgtatcgaagggcgctgtggtagcagcgtgtggcctcctcactatcgtgctctgactcgtacagttgcccaagctgttcccaaagccctggctgggctggctcccggagcaatgcctgcacacagccatgcagggattccagcttcccatggaggggtcttggagtgggcgccctacagagcagaaggggtgggggtgtgggtgggggttgggcttgaggggactctttcaaggccccagccttacctcccactcccagaaccttcaaatatccactcaccctggagcataatatggtttgctggggtgcccagaactactgccatgtgaagggggtaggggagcaggaagcgggggctgcccaatgctggctgagcatctggagagagaaggagtctgttatatacggcaaaaaggagcagtcttgtcctacctaggcaggagggggctgatgcacggaagcccacagaatgacaggaacccatggagaatgacacagattgagggatacagagatggaaagasgtgtgcctggagacagagggccccaacttctcacctgcctccaggcagccatgcgctacgaggagggggatgaggcgggcaggagctccaggccccagcacagctcaggcccccaagggcaaaggcttcccgtgcagcgcgggcccctggagggtccactgcccgatgcatccagcctgagttggggataagaaattatgctcttactggaggcaaaaccagagctgccagtgtacatccagccagctcggccccagagtttcccttaccaggtcagcagtggccccaggagccctggagattgggcacrgccccctgccccagctctctgggacgatggtccggctccagccgctctgataagagtgcccgctacccccagatggctgcctcagtcctttcacagccaattctagagagaaggaaaaggagtgagacgagctggccagcacacagtcaaggcccaggggctgggatgggcggactgtggcatccaccaatttgtcatttgtgcaaagggcccggccttagctttccccaaagggaggcccggcccaaccactccctagaggcccaggagtgtggctgggagtcaggacgtgtgtggcagggaaccaaaaggccggtcagagggacggggtggctgcgctgccaggcttccagtccggagccactgggccgacccaaaacgcagcggccgcttacccggcctccgtgggagcgtcctcacaccgcgtcggcaagctccagagatctggccaatcacaggacttcctctctccccagaaagccaatcatcacccgtgtctccgcctcagtaacagcctggccggaaccaatgggagcgaggtgagcccggcagcggtggccgggggaggaggggcgcgggagccggtcagacgagctcagcccggggtgaccccgatgtgaccccgcggctcccacctagggtccccatctaggatccgacactccggccgtcagggccagaaggcagccaggacaagacgcatgcggatgaggccggttagtcgcatgctccggccggcgtgggggccggcgctacccgcaagcctcaagcacccagagccgccggtggccacggccaggctgctcgagtagccccacgcccggccaccgtaagaccgacggacgacagacggatgcagaacgcaaaaaagacgtccctccccttcctcacttcacctcgcccagtgacagacctccctaccccgagcgcccctattaactgcttagggctggccagccacagcgacttccacggcacccaaacccgtccgcgccgctatcggcgctccacccccaacgcctgaccccgacccaaaccttggtcaagcccccagtctcatacccagttcctccaggtcctctacttcccctggctttctgggtcttcaataccgaccgacccccaaaatcagaccccttttagtcccccaacttccgagaagtcgcgcaccgcggtcccgagtggcccctctctcgtggctcgcgtatcctctctgcccttccccgccggggccacgcggttccccacggcccacgtggcccccgccccccaagggaggggggatttcgggggttgcccgtgacgtggctacttgcgcagcggaagcggtgtgtgtaaatgtactgcgggggggggggtcctgagggagggaggagggcggggcccgacaggcagtgacatcacccttgtcccactctcaccacccactcccttaaagaacccagaactcgtttcacttcctccttcacgccccccccaccctttcgctttggtgccgactggacccccgactggcacagcgctcccctctcttgggcaccttccctttagccccagctcttccttctcgcctctctgagcccaggagctgcgtccccgcgcctcctccttgcctacccggcgtccccgcaggtagggagccgactcggctcccgggatcggtccattgagagtctagagtacaaagagcagcgagaggcgagtgtcgagtacaaagccgcgggggcggggccagcgctccagctggagcgagcgccgggcaggaagccgggggagagtgcgcgacgaggggctgggggtggctggaaagttcgcgttcgttgagagaagtctgcgctgtggggaaatttccacccagcccacaagggcagacgggtttctggtgaaaagagccttccttcccgaaggggcaaggtcgtttgtttgcatggaagcgcttggaccctacaggtccctgcgtgccactctccgccaagcccttgtggtcgcttgggccccgcggaccctctccgcggttcacgtggtattactgtcagaactctctcctcactagaggcagcatcctttccatcagtaaccaagccaggtacggcgctgaactgtggtcaagtatggccctccgtgactgcccccacccgagtaccgaggcaggggcggggaggagacccaagaaccagacgtggagggggagccggggaaccagacaacagaggggcagatgcctgcttgggaagtggtcccgagagcgccgccagttaccaggaaaggcagcttccccttcggcgatgatgacacttcccctctgccacttcccctttcccacggggaactgactcagctttccctaagtcagtgagtgccgtccctccagctccctgctcttccacctttatccacaaagccccacgccagcacccaagaatacaaagccctcacttgaagacaaaacttcctgtacactaaacacacactcattctcgccagccacctcggatccttgtccgcacccgggacccaggcgctggactcctcactcgcccccccgccccccgtacaaagccctccctcggggtctgattcaggcttggggtgggggagcgtgagtcacccagaaaaccttcccctcttcccactgactcagcccccgcctccctgaacacacacagacacacagtcagaggcagacacaactcctcagcccacacaccggctcaccaccggtcccgcggaatttcccctctcgtcttcccccacgatggcccctccccgtgccgggcagccccgacgcggcgcttgcacctgttccccagtcgccgccagctcgcgctccactctcacctccactctcgctctggggcaagaatagccctccctgactcccggtgtctatactaaccaagggaagggaaccacggacaggcacaaagactgacacccacagactcctcgaagacaggcgagaggtagacgcacgcggccagagccaggctgggagatcgatatacttctgaggcagacattccagcctctcccgacccgacccacaacctcgggagccagcggctctgaaagggttaattccgctcccgccgaggccacaccctctccatccgggcactcccrgcgaagcccagctccgccccctccatccgggccctggactcgggactttaaccgaccccctaccccccgcccccgctggagccccaagagagaacactccatcaatcacacccacttaactctctctgggcttgagccgaggagcccctccgcgcagcgccgcagccgcgcgggacgcgtggtaagaggcctgaagtgcgcacgcaaactcacgtgacggccagagacaagagcccgcagatagggttttacctagccggcaatcagcgggcatgctgcgcgcgcgccgaggtggggcggtccaggaccctcgtcgcaacccgctccctgcccgtcctcatcacgcctggtggaagcgaggggttacacgctcgcttcttacctgggggagggggaggcggaggggagggccgccggctgaggctccgctgtgactcagccacccgggcaggccgcccgcccgggattcccttccccagccttcccccggctgccggcccctccccgccccccaccgaggagtgacggtgccggccccggcccgctatgtgtcactgcaggccttgtgtctgcctctgactgggcgctgtgttcaccagtctgtctgacacggtcggctgtgcgtgggtcccggtgtctgtctccgcgtgcacctgcatatctgctcatcttgtctccctctgtgcctgtgtctgacgcgttcctgtcattatccctgtctacatgactccgcggggctgtctctgtctgtgtgtctgcctagctcctgtctcggtcttttgtctgggtctgcctctgcatcactagcgtgatcacgtgtgtctccgcacatgcccttctgtgtttgccttcatgttactgaacagagtcggggcgacactggcgcaggcccaccctcctgactccttgctacactcctctcgatcctgacgtctcgctggatcagtgatcattctgtctgagtcaagaatttggaggtctgtctgccttcaatcaagttctgtcccatccctcgacatccctgcttatcctcagagctccctgtggctcccactgtggtgataactgctagcattttgtgaatatttgttacatgccaggcactgtattaagtattttacaagcatttcttttactcctccccaaaacctgacataggaggtactctgattacccccattttacagatgaggaaattgaggcccagagaggctaggtgacttggccaaagtcattctgcaagtgaagaatgaaagagctaggcttctttccagagccacattcttaccactcttatgtactgcctctgtcctactctccctcccttggttttatcctcacaggccatctcctgggtcaaccttcctttcagctctacccatgttaccatccccaatgtctcacgtcctctagaggakaaagtaggaggctgtgcagcaaatctcagaagtcataggttcttcataatgaagctcattcagttaacattattcaacacaaatccaccatgcaccccaatgtgcaaaacatcaagcaaaatagtgagagacacatagaagaaaacagtcccactcgagaaaccccatatgtaatgaggaagaacaacacagagagaacttaagcccctggcttagggattatcttcccttttctcctacaaaggaatgggaaataaagcagggcctcaggcagagaactgacagaaggagagagggaagcagaagagtaagacttaggtatgggggcaaatgctatagtgcagtggggagagaatgggactgaaagagatctggaaggaaaggtgaaatgccaagactgctgtggctggcagtgatctccactatctccccaaataaattctgaacaccctccaaaagccagggtgttcaacaactcctatagggacaaagctgtttccctaccaagaaaaaattcctccagggtagctcatatccacttttcagcttgcaaactccctcttcatttcaataagcaactgagttgtagcactagggagatagtggggaaaagattttttggtagtagtggagaggctggtgaagtacagggctgaaccatttataggagatagaagggaggtccataaaccaggagggctgaaccactcaagcaccacatggtggggtgcttagaattggactggaccattctgaagagtgggcatgatccagatcataccgagcatctccaaccatgtggtgcagagttagactgctgaggagagagggtcactcagacaggacttaccagatggagtttggtgtgccctgtctcattggaaccaccaccccagcagtggggtacaacagaccacagtgggtggggtgggcagtgctacggggctggcatgttgccctggggggaacctaaaagaaaaaagtcagttagaggtgggggtcttccaggatggagaattttcctgggctccctgcccccctcattaaggagaaacctggctctggtggtcagatatgatgggagaatcttgtttccatggcaaccagaaaaagccatccccaaagtggtcatccaaccttcccctttgggaagcaggctcgatcagttggtaaggggccatgatatggcatctgagtaagtctacagtagaccccaaacccgtgatccctcttctgacaggacgctcctgctgagactccctggcctgagtcgccccagctgccctgacatctgtacacaagccagcctgagtcctagcaccagggcatgcagaccctcttccttcagctctgtgtcctctccaaccttatcaagacaccagacagtcaaccccaccctctggactctgccccctcttcttcccccaggcgggtgcaggcaggtcttggctagcagcacaggtagccagactagatgaacgggcccaacagggaggggccatcctcccctgcaagaactctgactctgggcctaagcctggaagtagcctccactgcaagcctcccctccctgccaaccccaaggcaatatcctgtttccccatcacctccttcctcttatgtggcctaagaaggtgatacaggcccactcccttcccaaccctcatagacaagaagctaggtcttttagcataagtccaaggccaagaatcaggtgtccatcaggggtcagagctaagttggccctcacctcagactcgctcctcagggacctatgttttctgctcccttaatcatagttctctgcccttatggacccaaacacttggggtcccaatctaatctctatattccctagccttccggcccccatccttccccttgcctcagagactcaggcctctagcccccagtctccatgatgcaatgttccgcaagcttctgtggctgctgatgacactgcccccagggaggtgctatttgtgacccaccaaggcctccttcctaagccagggtagtggtcagctgtaggtggtagaggtcaggcaggcaaggcccttctgctcgggaagggagcttcaggctagaactctccaggacagggaggctcataacctgggagcagagagtgtgtatctatagtctgtggcatctgtgttctgcggttgtgctggggggagggactaggaaagggctagtcgagagcagagtgggcagactttaggacagaccaagaggaggagtgagggggaagcctagggggtcagagggtgtgtgaggggtgtctggacaacagagtgggggaggggctaacagccatttaaagggccagccccagagctttaatccctcaccagccctggccccaagccggaggctgtaattcatctgtccaacagctggggtgtgtgtgtttgtgtgnnnnnnnnnnnnnnnnnnnnnnnnnnnnnnnnnnnnnnnnnnnnnnnnnnnnnnnnnnnnnnnnnnnnnnnnnnnnnnnnnnnnnnnnnnntgtgcacagagccaaacaacaaaaggggaagctgaagtaccagctccaaactgcccaggccagacccctgacctgcagaccagccggtggcccctcacctggtggccgacagactccatagtttggactcaaggattcttggccaaggagtcggtggacccaaaggtggggccctggaaaaagcccaggctgtgtaccccccaggcaggctgtcacccctcattgcaccttcccagccgcagcactgtcccagacctggcaggcccagcaacagactcagcctcaaatgccctgctcaccagccaagcctccccagacatggcctgccggctccccctcccgccggcgcagggtggcagcggccacaccgaggctgtccctttaaatcattaccacccctgattgtgtggacgaaccaagggccctgccccccaggcaggcggcttgccacctcccccccatgagtccccagaaatgtgagggccatttaaagggacaacggagaggcagccaggtctctaactgcccccccacccccaccctacacacactcacagaccctttccccagcgacccagagccccttgcccctccagggggccccctaaattccggttctctccccacccctagagactgctagaaggagaaagggggccagagttggggaggcggggaactgggggggagcaagaaaaggcagggactccctcctccccgacagccccaggggacaggtcggaagggaagcaagagcccaaagcagcagccagacagagccccaaaaggtgccctgggcagacctagggcgcacaggctgtcgggcgagaagggaatcaggctgcacgagacgccggcgcggccagcgggcgataagcccaagtgggggcgatggaacaaggaaggccagggaaaagaggcaaggccggggagaaacggggagacggaaaggggaaaaggggtcatccgggaaggtgtggaggaaaatcagagaggggagggcgagccaggccggggttacctgctgggtgtctgtcccccggcggtgcccccggagtccgggtagggaggggggnnnnnnnnnnnnnnnnnnnnctgtagggcgcccactccaagacccctccatgggaagctggaatccctgcatggctgtgtgcaggcattgctccgggagccagcccagccagggctttgggaacagcttgggcaactgtacgagtcagagcacgatagtgaggaggccacacgctgctaccacagcgcccttcgatacggaggaagctttgctcatcccctccctccctccccaccagcaggctccctcctcctcccttccggtctcttcctttaactacccgcccccccagcccccagcactagtctctctccacccacccaccccaaccttttacacacccctcagcctagccctgtccccactagagaaactgtggagtccctctgcaaaacgaaaggctccagagatcaacacgggagggggctggggtcttgcttcaaaatcaagaaccataatacaattattttattttcaaggcccacggaatagtcttagctatttcttgtccaagagaaaaaaaaataatcctaaagaaagcaatacaaatctgcctaaagccttcatcaaataaaatgcacaaagcagttgaagctaatccccagccccctaaccccaatctccaaattaacacaaactatccactaccccttaacaaactcctacggttaccgctggtttggagcagacccacagcaataataataaactagtaactaacaccatttaataataaaagtatttcataacaacaagcactcattctgtgttcattctgtgccaggcactgtgctaagtgatttgcataaattatctcatttttttcctcccagcggccttcaaggtaggtgttgatatttaaatgttcaagattaacatacgaggctcagagaggttctgacctctccaagtcctagtagccactaagtgacagagctagaattagaatccaggtctgatctgacagcccaagctctaaggtacataaaagcacaaaccgattcattccaataccatcaccaaccctgggacttaatagagaagaacaaccatagcaatcaactgagtccccctccaccaagtgagaggctacaaaccgattcacccgcatacacacaataaagaccctgacttttcagcctaatactgtttcttgacccttttcctttcattgtttgcagatgggggtgtgccattatggggatttcagggataagctggtgtgtagtgaacccccccccatactacacacaactcttccgtctttcaaccactcccacttcaaatcaatctggggaagggggcaataggacacttggccatgcagcaggtgggaaagtaaaatgacggctaggtagctttttctatgggggcggagccttggaggggaagctcttctgtgccaatctagggaaaagtgacccaaggctccctcagcccagcaaaggggcaaagtctttcagccacaccacacccgtgcccctccccctcacaaaactccaggccggggtttcccacctgcaggatgctaagaccacgggaagggagaggggaaagagatggcacgggactggaactggactcggggcagaggtgggagggaatagaagggggaggaagcctcattgcctggcaaccatcccggggcacgtgcactagtgacatcatcccaggccacctctaacacagacctttgacccctacggggcggagtgggtgtgctggctaagcttcctggaaacactggaaacacccttaggaattctgggaacccaaaaaggagacataagaagaaacccaggcgtccttatctcttttacccctaatacgactccaatcccagggactcaggcctcttgcctgtctcctcctctccgcctgcagccctgacctcccaacccacatttctgacgggagtcggcccgacacgcccctcggagatactgtgccttctctctcctgggcgagatctcggtgggggccggcaggcggggacgggggcaccgggtcccgcggggctccgtcttccatctgcaggatcccccgtgccccagccggccgccagccggaatctgtctgggtccccaactctcccgcccctccccgcgctgttccagggcggagtctgtggagttgaaaccaggacacggcgagaggaagagttatataaccgggagaagcgaagaaggacgagtggagacagggacagacagcccgaaaggagccgagggaggtgcaaagaacgccggggcgaacgaggaggaaacgttaggaatgggaagggttttggtgcacatcaaagagcaggaattcacgcgaagaaggggcgtgatggcccagaagaatcacctgggccgtccggggcttccccgcagtgccctcctccgccaccaacagcagctgggcccgggcgggagaagccttgggaaggggcgctggtacccgctcgctttctcttgggaaagcaacttaagccagagcccgggaaggcagcggccgagcagatggggccggaaaccacagctccgcccagcccacctgggagtgtggggcgccagctggggggaggtggggaacaggtagtcggccctcccgagccaggctgggcattatggtcgcgaccggcgaaacggtgcagaccgaccgagacgtgtgggtccccaggggctgaagagcgcagcctcaggcggctttacacagactccacgaggggaggggggcgcccggctcgccgcgcaggcgcaagggggtgctcgggcgcgtgcggcgcagggcggggggtgggcgcgagcgtgtgggagtgcacgtgcgggtcccaggcagctgctgcctcccagcctccgccgctgcccctcccctctccctttcctgtcgctatcatcccccttccccattggctgccagggccctgacgtcagggccgaccgctggagcggattgggcggacgggagagttcgggaatccggctcccaagtctcgccctccagttactctggcaacaggacaagcaacccaggggagggaaggggagccgaggtgaacgctgcgcctcggtccctaaccccctccggacaaccaccgagtccccttcggtcgcggcgcagctcgctacctccccgccttcctcccagggctcttcctgtcccgggaaccaggcgtcctgccctcggccttccccacagtcttcaggccctccgctgtctctaacccccaccagtgtcacaacataagctgcagcaaacaggaagcgaatctacgtcgcttagcaaccaccccgcgtgcccccctccccactatttaccccagccgggagaggcggagattgagtccccagccccctccccgtcttctgcgctgcgacctcctgcccacaatttc

SEQ ID NO: 97350 - DNA, 21952 bp, Homo sapiens
ggcagtaaggagggaggagtctatcccttatggagagcacatggacttctgggtgggtgtcctgcagttcccttcctcttgagtctttttaactgggggtccggtgtgtttgtgatcaatgacatgtatgcgtgtgcatgtgtacctttgcaggtacacatgtgtggtgtgtgtgcatttgcttggtgtgcgtgcatttgtgtgtgtgtttgtgtgtgcatgcatgtgtgtgtgtttgtggtaggtttgtgcacacatcctgcatacctttgtgcctgggagtggcatgtgtgtggtgggtgtcgctgtgcatgatggagttgcagccgtggtgcatttgtgagattacctcggtggcctaaattggggattaggagggcatcctcaggtccttcccactgtctgctcgtctgcccacaggcggctgtgccctaaacaggaggaggccattcacgcctcgcctgagttgtgtccaaggtgtgcgtgtggccaggggtccatccgcttccctctagcccagcccctgaacacagctgcagtgcacggccccactcctcagctctgctccccatcccaactcgaagacgctgccctggccctgtgtgtgcagctcatgtggactgggagggcagggcaggtgcaggtcttggggcaagagctggagctgtcttttccttcctgcacagccgcagagcaggtggatggggctgcttccctgcaagggcccagggccaggccccctggggatttattcgtggcttagaagggtggggccagaagcaggcgtagtggggattagggactcagcacccccagctctcagtccagcagacagacccaccccaggctgactacagaggctgcacctcagcaaacaggtaggccctgttcttggggaggattcccaccaggcaaaggccagctcccgggccctcacctgccacgtgtccaagctaggatcctgtttgcctttcccttgggggctgggagggaggcctccaaccccctctggcattaccagcatcacagataggagtcccaagtcctatgagaagttcctggaataggtgtagattcagtagatctttacaagaccatatctgcagggcaaggtaccagaggacagaggcggggacagggacacttccattccagacctagcagcccagcactcagcaccatgcatgggagcaaatggctggactcctgggtggggtgggggtctcagagcaggctcccagagggcttggaggtgactccaccaggtggggacggcagctcccaggtagggtgtcatcagagtagacagcattgcttgctagggacccctggggaggctgacagggtcagtgggtttcagttggggggctcccctgctgagaacccagtaaagccggccttccattcgtctcccgtgtgcccagagcctggtctgagggccgccctgtgcatgccggcccttccaacgtggcagagctcagggggaagaacacccaggctctcaggagactctcaggccaatgtctccatccctgggtcagccctttcctgccatgaattcaggaaggcagaggcagctcagcagatggggactagaggccgcactgctatccacagcctctcttctcacccccaggcatgtcgggccccaggcctgtggtgctgagcgggccttcgggagctgggaagagcaccctgctgaagaggctgctccaggagcacagcggcatctttggcttcagcgtgtcccgtgagtccagggctctcgtggaggggtgcgtagacctcaaggctgctgagtagtcctagcaccgtgagcaggccaggagcccaaacccaacaggcacacccaccctgcagactgtccgaactcttgcacactcccccccacacagaacctgaggttatcacactcctgctgtcctgcgtgcctgtgtctcccttccctgggtctgttgagtactgataactgggccacagtgtttctttctgggagaaccctcgccttgtaggctcctgcgccttcccagtggtgtgcttcactggctgcctgcatcctggggctcaagtgctgtcgggactgcaagggaaacgctgggtggggcattgggctccgagcagcccccgatgggtgacaggtctctctgctagataccacgaggaacccgaggcccggcgaggagaacggcaaaggtgagtggggtggggccctatggctggagcacccccagtgtgggcagggctgctgggccctgcagctgtgttggctgtgctgcccgtctcctgcccccatcaatccctaatctgtgagatgggtccttgcctccaagggccggtgaactcaatcagggtgtcagcgccacagcgtggtgtcgccttccttgggtacagtgtgagaggccggccaaggcctggggctgtcttcctcccaccttggaggcggccacagtgctgctgtccccagccctgtcctggactcggcacttatcagcacttttgagctgtcttctggggtcctggtaaaaagggctactctgcctgcctgattcaagacaagggacccccttcccaacagcacccccgccccttgccgtgcaacccagtggtctccagtcaccccaccacatcgtcccctctgtaacctgacggtctccagttcccccaccaccttcccccagaacctgttggtctccagtccccatcccatcaccaccaactcccaactccccactggaacccagcagtctcgtatctccatcagtgaggacagtgtgagaaatggtgtctggctcaggcacttggcagcacttgaggggtcctcagatgtctcctgcccagcaaggatctgactaaagcagtcgtgggtgtgggaggggcctgcaggcatgcctgggttgggggcagctggccctgggcaccctggtgcaggtccagtctgccctctggatggcccctcctcttccccagattactactttgtaaccagggaggtgatgcagcgtgacatagcagccggcgacttcatcgagcatgccgagttctcggggaacctgtatggcacgaggtgggccatgcgtgggtgtgggtgggctcccagggttgctgttggcaacagggatccaggtagtgcctgctgcctgcccgccatccacaccacccaccccatggttatgaatgtggccaggttgtggcccagggccaggctcccacgtctgtggcccacagtggctcttttcatgaggctgctgggcccggtcctgccaccgtgcattgtcctggcagggtgaagggtgcacaggacacctcatgctcactacaggcaccttggggagtgggtggcctctgttccctgtaggcggggcagggcgtgggggtagcaggtttgagatgctgtcgggtgctgggtccaggccaggcctaggctcagctgtgggaggagaacgctgggcccgggagggcctgggtgtccctgaagctcctgtaggcctcagagagccctggcacccctgctgacctggcacctctccccagcaaggtggcggtgcaggccgtgcaggccatgaaccgcatctgtgtgctggacgtggacctgcagggtgtgcggaacatcaaggccaccgatctgcggcccatctacatctctgtgcagccgccttcactgcacgtgctggtgtgtgctgggcagggttgggggctgggggccagggcatgccaggctctgattgccaccccctttttaggagcagcggctgcggcagcgcaacactgaaaccgaggagagcctggtgaagcggctggctgctgcccaggccgacatggagagcagtgagtgtgccgtgggatcaccagggaatgccaggaggggagtcagggttctgaggtctgtggcaccagggaccctgtgggtccccagacctcctgacacctggagtccctgtgagggtcctcagacctctcaactacctcccaacacctagagtccccgtgagggtccccagaacccacccccagtcaccaagggtctcattgagggtcctcagatttccctctgttacccagagtctccgtgagggcccccagaccccccatcgcccagggtcccatgagatgtccccaaccttctagccccgggggtgtcatgtgcatcctcttacagctgttgcctcttctctgggtctgactgcagcccacaagaagagggcatttaatgttctgctgtgtgtgtagaggatagtgtagcccctaaccagagtcctgatgggtgctggtgtccagacccaagttctggggctccagagagagcaggagtggtgcctgaggactgaggcccagggggcggcccttccctaccctgcacaggcccggctgggctggaaagctgtcccacagccgcagtgaggacagccgcaggccagtgggctgctctgggggtcgtgtgggacctggggtggggctgcatgggctcactgtgccctgaccccaggccccacccacaggcaaggagcccggcctgtttgatgtggtcatcattaacgacagcctggaccaggcctacgcagagctgaaggaggcgctctctgaggtgggcccatccttgtgcctacctgggcaaggcccaaggggaggcctgggggccaggcctttgttgtccatgaggccactgaggttagatgggacagtcctacccaagcactggcatgagacaccgaggtccacggtggagggagagcaggaagcccagcccttcctggataccagccctcccaactccctttcttcctcactggcaggaaatcaagaaagctcaaaggaccggcgcctgaggcttgctgtctgttctcggcaccccgggcccatacaggaccagggcagcagcattgagccacccccttggcaggcgatacggcagctctgtgcccttggccagcatgtggagtggaggagatgctgcccctgtggttggaacatcctggggtgacccccgacccagcctcgctgggctgtcccctgtccctatctctcactctggacccagggctgacatcctaataaaataactgttggattagaaactccataaatgagtggaatgtggccccaaggttggtggggccccatcatcccgatcgggccctgagctccggcagcccaccctaaccaccagccccaaggagggccacaagatggcctctgcctaggcatctgctgcctgccggctcgtggctgctgccccagggcagcatgatgcttgactggcaggcagggaaggtggcagggctggtcccaacccacctggcaggctggcaagtggggagcaggaagcggctgcatggggcagcctgaggctgcaggggtgggccctgagggctgcctcttggtgcccgaccctgtgggtctggcatgggccagaggttccaggagaggcccctgagctctggcagctggaggttctagatctcgaggtctaaggggttccctgagggagatgcccctcccctagctgccccaggggctgtgtgtggtgtgtgaggagcctcctctgctcaggctgcctccctccttccccagtgctcccccagcttgcctgtctaaggcagcacagggccgtgctgccagccacccctagggtcagccccagccctgttctgagcctaggtgaggtgcctctggggtggggtgtagacagatgggtgggagagaaggaggcaggcagggtgcccggccggaaatgggggcggggagaagagtccccgcccagagcccagactgccggaggatacaggccagagccgcctggactgggcggctgggcaggggaggggaggggagggcccaggcagcccccggtcgcttgctccagggcaggtggactgagcttcggaggctggggctggcctctgacctgcttgggcttggagagccctgcccgctgccctgccccccaggacaatcagggattcagaccctgaggccgaggggggaacaatggggcccttgagggcccctcctccagcccccattgtgcttggtggtgagaggtggccctggctcggccacacaccctcggggaggaccagcatccaagcaggtggaagggctctgagggagactggaattttctggcctggagaaggtagggtgctggggtccatgtatgtacctcatggggctgggggctgttgccccaggagacagcctcacgctgtgccccttggccttgaggccccgaaggagggagggcttcctagggcccagccataggagggtgcactccttgcgcctgccaccccctcctgggctccgctgctccacgcagatggtggggtggcccccccactccatgtctgtgtccttcaggcccagctgccttcaccgcagggtgggcaccaaccggtggggtctgctctgggacagctggcaagcgggaggggggtgccttcagtacctcccccagcagctggggcccctcaggtagtgatagggctggcctctgaaacaccagccagctgcattgtgtccaggcccagtcccccaccctcagcggccacctggaggtgagggggccagcctgcccctggtatagacagacctggggccctgctcagtcccctccatagaaggccacaagccactaagtttgcactggggcccagcctaggtctgaagcccagcagaccctgtggtcaaggatccaaccccagtgcctgtcagtgctgtgattaactgggtggaggccccccgggggtgctggggcaggccctcagtgcaaggaaggggcggcgtggctgaggagggggaggcccacacccctctgggagggcggagcaccccagggctgctgcgcagggaggccacagcccaggcgcgggggcccccatcccagagctggatggcagtgagcccaggattcctggctgctgggcgttcaggagggaagagacgggttcgtggatcctgcgggtggagggcagggacagccttaggaggctggggtaatcatcaccccctcactcccagtatggatacccgccagggctcggtttctggagggtgtgtggctcagctccaggcctgcaacagccctggaggctggcctggggagctgcccaggcttcagcgatgacacactcccagcctgacccaggcctaactcgcccccttggtccacctccagaggaggaacagcccctcacttctgggcctgacagctctgttcctgcttgggaccctgagggagggaactcaagaacaggctgcaggaggggcccacgcattcacagcgccaacaaccccagggaggagagggctccacgggggaggaggcaccagcctggatgctgccttgccacctgcacgtgtgcacggccctggcaaggcctggggatcccacagactcatacctccacaccacgctcctcagtgtcccctcactcccctgacattcctgagcgccacacccatgctcttgggctcctgggggtctggtcagttcaggagctgtggcaggccatgtaaggggagccaccatgtgggcaggcacttggggtcttggtgggggcaccttgctttcctgggcctggtggggactcctgagggaggcacgtggtgaggttgagtctgaatagggagggttcatggctatgtgtgagagtgagtgtgtgagcccagctccatgttgagctcgagcagcagtgtgcatgtggcagtgtgcactgcttgtgtgtgggggggtggagggaggagcgtgccctgtgtgtacatgtgaaggatgcatgaggatggctggtgcccacacccagtggggcctactgctgcacaggcaggacagtgaggccggccacagagctgctggggcagagtgggcatggagggagggttccaggcctcgggcttgggtcctaggtggctgagctctgcacctccctctggaccagggcatccagaggagcatggctgagggtgcactcggggctgaccgtcccagggcctgggctgtccaggacaggcagctgggggctcaggcagggacatggaggacaggtagtggagctgccaccacagagctgagctctgggcatcagggtagggggctacggcctgtcagcgggtgaggagaaattgaggcctgaggatgggtgagtgctgtagccccctctgagtgaggactgtccccacacagggccctgcagtggagtgcaggggaaggaggggactgtgcctgcaggagctccagggaagtgggactgggaatctgctttggactgtgagtggacaagcgacagcacagtgcctgccatgcgctggggtaccatcattttcggggaagggaggagcctgccccagggtcccgcctggtgaactgtgtgcgtgggtgcctgtctggtggctgccctaaactgcagaaaacacccacccttcgcggcctgccctgggagggcctggagatggaaggaaatacctgggcccctgaccctgtgctacacccagcagggcggggctcgttctgcagtgcctcaggacccttgttcagacccaggatgagcaggagcttgatgggggagggggcccggctctgaccggtgtcctgagataccaggacaccaggacactggtcagagctggcccagccaggtttgcagacaggcagcctcagcttgggcctgcttgccctgaaacccttcccagaggtggcccccactgtgagcccccatggtgagtccctttgctcttgctgcgcacccctttgaagcccttcctgtgagcccccgatgccaccagggcgagaccgcccccactgtgaagccccctttcacaccctggcctagtagcgagcccccatgagaccctggtccccagtatgagaaccctgtgagtccccggccctccaccaatgcccacatcctcctctacttcccacagccttccctgaggctgaccctgcctcaccactcccagacctgggccaggcagcgtcctggctggtggcctcctgtggtcacccccctacctcgccctgacaccttactaaccccagcagctgcctcctcccagactctgaagcccaagggtgcctccagctctttggccaagctgaagcctctccccaccaatcctcattttgggcaccctggaggtgtagctttggggtgagatctcttggacttgtgtgcacatagtctgcaaatcccgggcctggctccctgggggccagcacccctcccctctcctcccgtgggcctccaccaagcccctgctgacagcctcatcctgcagcactagacagtgcccacctcagcttgtcccgcctctctatcatggtcctttctttaagtaggggtttattttacagcactttcacagaaaagggccaaggtgtggatggctcatgcctgtaatcccagctctttgggaggctgaggcaggattgcttgaggccaggagatcaaggagacgatggtgagttatgattgtgcggctgcactccagcctgggcgacagagcgagaccccatcaaaaaaaaaaaaaaaagtaaatagggtctggctctgtcacccaggattgagtgcagtggtgtgatctcggctcactgcaatctttccctctggggttcaagcgattctcccacctcagcttcccgagtagctagaagtacaagcgcaccaccatgcctggcaaatttttgtattaagaccccatttctcttttcttttttttttttttttttttgagacagcgtctcactctgttgccccagctaagtacagtggtgcaatctcggctcactgcaacctccgcctcccaggttcaagcgattctcctgcctcagcctcctgagtagctgggactacaggcacgcgccaccacgcccggctaatttttgtatttatagtagagatggggtttcaccatattggccaggctggtcttgaactcctgacctcatgacccacccacctcagcctcacaaagtgctgggattacaggcatgagccaccgtgcccggcttaagaccccatttcttaaaaaataaaaataaaaattgccagcatggtggcatgtgcctgtagtcccagctactcaggaggccaaggtgggagaattgcttgagctcagtaagatttacagaaatgctgtgaggatagtgcagagttcttatagacctcacacccagtttccccgttgctgacgtcttgcattagcgtgacatgctcctcataatgaatggaccaatatggatgagctgggattaactgaggtccttgctgtatgcagatgtctttgcctctcccctacagctccttttctgccccgccatggatcccacatggtgtcagtcaccgtgtctccctggactcctcttggtttcggcagcctcctgggtctccttgtatggggtgtcctcactgtctggatgaacactggccggatgttctgtagsatgccccttgggtgggatccctttcaccctcatgtttccttatgagtcttcagggggatgggttttgggaggaataccatggagttgacgtgaccttcccatgagatgctgtgaagcatccacaccattcacgatgcttgtgatgacaccttggccgcctggccagggttggtgtaggaggcatgctgcagaggcgctctccccctctccctcccacaccctctgaagccaggttaccaggtgcagcccacaggtagggatgggggtcatgctcccctccagtacagagtgtccacatggctgctttggattgactctgcacagaggagctgtctcctgtcccccatttggttatacattcagtcacgtactttggcttctaatctatgtcagtctgtaatctgtaacacaagactacttgatttctttcactgctcagagggatccagtctcaggcactgggtgctctacgtgcaggtgctgcttgcacagacttcctctctgacactacagtttgcgccaggctcttctgtacattcccagccccagccctcgggtctgccagttccccaccaggggttcctgattcctgtgattgggagtggaggtaggaaccaaggcctgggccccaggtagattcttgctcctagggtgtttttgcattgaggcctttgcaggcgccagagcaaaggtgtgtgtctgaacccaggtgcatccacatagctgtattttctatgaaaccgcccacgtctctgtgagacaccctgtggtctccagctgtgatcgtcatcacatggaatagtcactagcagcatggaaggcggtgacacagcgacagcctcagggaagggctgaacctgtgtgtgtgcgcctgtgcatgtgtgtgtggcgaggccaggtagcaaaggctcctggtgggagtgggctccagccagtgtgggagccgtgggcagagcacacgaggggatatctggagccaggcgtrgaatgggggcaggggacctggcactaaggcaggtgaggccgcggcattcgctctggttaggagtcacaggcagggcaggagtcctgctgggtgggcgtcctaatgctccccaggcttgcaggcaaggagtgaagtgcttgaggccctgcaggcggggccaggctcaggattggctgggatagggaagctgctctgcagagcagagtggcatttgggtgtggccctctggcagtggctgtgcttgctgggcatctgagtgcccatgttgggggtggcagcaggcccaagagagaattacaggctggaggtgtggatctgggagtccccataggcgtggccctgagaccaggacccaggttcttccagaccattcccaggaccactatgtgggtgcaagtgacacaggcccccagagctaagtgccagccctcagacgccagggcacatcagcccagggccgagccacagtggtctccagagctgagccaatggcgccgtttcctcagctgaatcaaggaagccactccgcagtcagccacaacgggaatgctcacaccatgggcactggcaggcgccattactgcaggctgcccccagagagccatttgttcaatattgcccccacacagctgggcaggctggccctggcactgaaggcctcctgccccatctctcccttgagcctgctctgtctcaggttcctgtcgggctggaatcagtgggccttagcctgctgtgatgggtcaggtggggagggaggtgggccctgcctactggagccagggagataggggaggtggcctcagggctggagtgtgcccgcctgtgcctgtgtgtgcctgatcacacgtgtgtgtgtgtgcacgggtctgtgtgcatgtgtgtgcatatatgtgtatgtggttgtgcatacgtatgtgcatgtgtgtgcatatgcacaagtgtgtatgtgccactgttttcatgcatgtgcatctgcatgtgagtgcaaagaagcatgcctgtggatgtacacatacatctgtttgcattaaccctgtttgcatgtgtgtctgagcatgcacgtgtacatgtgtatgcatgtgtgtgcatgggtatctgcatatgcatgtgcrtgttcatgcatgtgcacgtgtgtgcatgtgtacacatgtgaatctgtgggtatgtatctgagtgtgtgtgcacatgtgaatgtgtgtggctctgaggggtactgcacagatgtgaggaagcagggccacttccccaggaaccctgactgccccctcttcctgccccgggtggggaggcctcagctgcataaagaggccgggagcctcaccagcgactgctgctggtcccacacctgccgctgctgcctcccaggccaggtaccgggagggggccagaggcggagggagctaaggggtctcctgcctcagcgacccaggagcaggtactggccctggggcaaccgccagcagagggtgggcaggggagctgcaggagctctccttctttggagcacaggccctgctgcacagccctttcctgggcacttgcccaccttgggcttggctggtctgcggcatagctgtctctgagggtcgcaggtgctgagtgtggcctcacatcactgggtctataacctcgctggacaccgtccctcctggacggacgactggcttcatcctgaccccagctagagatggtctgggttgagaccatggaggaccaggaacctagactgggcgggcggagccctgggaccctgggcacctgagaagggcagcgggaccagccgggggctggagggaggatggaggattttgtggaggtggagggaccccgacgcccctgtccagggtgtggagggaccccgacgcccctgtccagggtgtggagggaggcagagcagggcctctgggggccgaggggctatggggattgtggactggtggcactttggggtctgggagctgatggtggtgcaggcacggggggctgtgaaggactgagggctgatggggctgcaggggcttgggggctagggagctggaggggccaggagggattgagtggctaggcaggctggggagaccctttggatgctgaaactctgtgggaccctccccaacaacctggatgcggctggggctgggttggtggccatgggtgcagtggacactgagaccaccagtccccacacacttgagtggtgcttgcctcagtgtccccatctgcctcatgaaggcaactcacccagctggggccctgcatctgcacgagcaggggccggatcaggtgggggcttccacttccgtttaaggcggtaagctccacgtcattgactgtgtaagcagagaggggccagctgcgaggcaagcctggagccccggctctgagcgccgcgggctcctaagtgcaggcccctggctgacccctaccccgccccacaggacccgcccgcccgcccctatgaccaacatgagctggagcttcctgacgcggctgctggaggagatccacaaccactccaccttcgtgggcaaggtgtggctcacggtgctggtggtcttccgcatcgtgctgacggctgtgggcggcgaggccatctactcggacgagcaggccaagttcacttgcaacacgcggcagccaggctgcgacaacgtctgctatgacgccttcgcgcccctgtcgcacgtgcgcttctgggtcttccagattgtggtcatctccacgccctcggtcatgtacctgggctacgccgtgcaccgcctggcccgtgcgtctgagcaggagcggcgccgcgccctccgccgccgcccggggccacgccgcgcgccccgagcgcacctgccgcccccgcacgccggctggcctgagcccgccgacctgggcgaggaggagcccatgctgggcctgggcgaggaggaggaggaggaggagacgggggcagccgagggcgccggcgaggaagcggaggaggcaggcgcggaggaggcgtgcactaaggcggtcggcgctgacggcaaggcggcagggaccccgggcccgaccgggcaacacgatgggcggaggcgcatccagcgggagggcctgatgcgcgtgtacgtggcccagctggtggccagggcagctttcgaggtggccttcctggtgggccagtacctgctgtacggcttcgaggtgcgaccgttctttccctgcagccgccagccctgcccgcacgtggtggactgcttcgtgtcgcgccctactgaaaagacggtcttcctgctggttatgtacgtggtcagctgcctgtgcctgctgctcaacctctgtgagatggcccacctgggcttgggcagcgcgcaggacgcggtgcgcggccgccgcggccccccggcctccgcccccgcccccgcgccgcggcccccgccctgcgccttccctgcggcggccgctggcttggcctgcccgcccgactacagcctggtggtgcgggcggccgagcgcgctcgggcgcatgaccagaacctggcaaacctggccctgcaggcgctgcgcgacggggcagcggctggggaccgcgaccgggacagttcgccgtgcgtcggcctccctgcggcctcccgggggccccccagagcaggcgcccccgcgtcccggacgggcagtgctacctctgcgggcactgtcggggagcagggccggcccggcacccacgagcggccaggagccaagcccagggctggctccgagaagggcagtgccagcagcagggacgggaagaccaccgtgtggatctgagggcgctggcttgcgagctgggccagggaggaggagggttggggggctccggtggaaacctgcgaccccttctcctcagccttctccttagccgrtggcctcaggcagactctgcccagaggggcagccaggctgctcagggaaggggctgaaagcggcagaggagtgccctggcttggtcaccactggggccaaggtggggtggagagaggcctaggagccagaaagggccctctgctgtggtctgaaccccagggggagtggggcattgactccacccctgtcctgagctggaataggtcctctgggatgccagctctcccctttgtgcttccctgcagcaacccatggagggcccagggtgcctggtatgggcatcagttggtgggggtgcgggggtgcgtgtccccattccctgcaacagcaaatggggctccttcttcagccctccccttcccagccccaaactgagacagactgggagctgggagcctggggtggacaggaccataccctctttgagcttctgcgatgccggccttccgttcctctgggaggcttgaagttctgcagagatgttgatatgccttgcagcttggacccaatgggtggtggtcagggcctgggggcttggccatgctgggggaatggggctctgggttcctgcctgtggcctgtctgtcctcctccctaattcagacccagcctcaagaggaaagggagtaaaataaaactaacttgtttataaccttgtgtgtgcatgtgtatgcatgtgcacgtgtggctatgtgtgtgactgcatgcacatgtatgtgcattgtgtgcatgtctgggtgtatgcttatatgtgtatgcatgggtgtgtgtgcatggctaccacatggggagacatggcttagctccaggctggctgggagaggagacccctccccagggactggcaggggagtatggtcacaggcgagcccctgtagcttgtcagacaacactcggggcctgctcggtgccaggcagcgtgccgggggcaggggtgggtggggcagggtggagtgcactgatggtgagaaagaaagaaaacactcagagcctcaggttgggccgcagctcagtggatggagggcggctgtctcaggccccgtcatgaccaggacgtcggccagagcctgcaggggtggctttggcgaggggcaggggggctcattagcccctggagcacactccgggtgactggctaccccccagcctcccttaggcctggtgcagcctggccggctgcccctcctgggctgcacacccctctctctgtggtgtccctcagccaagactcaagcccaggctgagccctgagtctcaccgaagcccagctccgggcagatgccaactgcaagctgagtccctctcctttctggggcttgcctggctgacctctggccccatgtgagccctgactcagggagccacggacagaaatgccgaaagtgcagcctcagggaagaaaagcaaacaccaaccccaacaggtgtccactccagtggggacacaccaggagcctctccaagacaggaagggtttggggctgtgctgctggcggtgccgtcacgggggaggccaggtccctgtggtgggggccgcggtgtccagccatgctgggcaactgtgcatggctcacccttcctccacctttggttctgttcaggccttcacctgatcagacgaggccagccacattgcagaggccaatctgctttcctcagtccatctattcaagtcttagtgtcatctggaaatgcactcacagacacgcctagaataatgtgtgaccccatatctgggcaccctgtggcccagtcaaatggacacataaaatgaaccatcacaggccaagcactgtctcacgtctgtcatcccagcactttgggaggctgagatgggagcatcacttgagcccaggagttcaagatgagcctgagcaacacagaccccatgtctacaaaaaatttaaaaagtagctgggcatggtggcatgcacctgtggtcccagtactcaggaggctggggtgggaggatcacttgagctagggaagtcgaggttgcagtgagctgtgatggcaccactgcactccagcctgggaaacagagcaacaccctgtctcaaaataaataaaattagccatcacaggcagactggaggcagaactgctgcttctttgggaaactttagtctttggctatatatctagatatagatataaaaatagtatatagtatctgtgtctatatttcctatggttttgtttctctggagaaccctggctagtacacatcccccagccagagctgttcaaagggcaccccagcttcgagggaagctggaaatgatctcaaacttggagggtgtgcccgttgggactgccatagcaccgcatcatccactgggtgccttaaacaacagacactgattatctcacagtcctagaagggaaggccaagattaaggtgtgggcgaggctggttcctcctgcagcctccctccttggcccgtggatgccatctcccccctgtgtcctcacacagctgtccctctgtgtgcatctgtgtcctaatctcctcttcttttaaggacaccagccaccgtggattaggacccaccccaatgaactcattttaacttaatcacctctttaaaggctttgtctccaattatagccacattctgaagttcctggaggttagggcttcagcacaggagtttcgaggggacaattctgctggtattagagggtatatgcccagtgggaagctggattgccacaagagaaggggagacgggaccctgggacagacctcccttcttgaacatttgggggtgggtgggccacatcaggtttgtgagcatctgctggtgggcttaggctctgttaccacaccctcccagcgggatggccctagccaggagaggctgtgcaagcccaagcctccacgccatctgctagtcctccctctaagaccaagtcctggataatctggacgttcccacaatgtcatgcctgagccccacaccaccacgcaggcctggcatctcccactacagtgggacgtggtatcttagttgctccagtctgcggacccccagaagctaaacccatctcgcactcctggcgcttgatcagtcacttttagaaaacccctgccttggtttccccagccacctggggaggccacgacggtgatgagctgagcctggcactgctgacaccacagcccccctccctcctctgtcctgcatcttccgagctctgaggcaggttggcaggggggccagtcgctggtgggcccagccctgtacacagcaggacacacccagagcaggcggtgctggagcaggctggcgggatgggactccatgtctcacctccatccgtttccacaacctcagccaaaactctcggctgctcatgggagtgcatagtggggtgaggggccagctgctcagagactccctcagaatagggcagtggcactctccttcctctaggaagggaggaagccctgaggcgagaataacaggaaaccaccttcccccaacccccccacagtacctgggaagcaggggctgcgacccctacgcccaggcattttccagttctcactcccctggcccctgcttcagcctggtccctgaagccaggacaggggcggggtttcctcccccaggtgccaggccccagtcccctgcctgctgataaggagaacagcagccagggtggctggtgtagagtccaggaaggcttcttggaggtggcctggagttacggcctcacatggctcaggcactggaatgtggcccccaggactctggagctgaaagctctgtttcctttgagtccattcgaactgaagtggcccctggtgttggtggtggcttctttggggtgggggggcctaggcaggacagattcggagccagtgggcccggcccggggcaccaggttgccgcacgcctttcctgctgcctgtgcaggggtggaagcaaattcctcctctggctgaggaccaggctgacgtgagcccagaggaactcgacccccgcccgtgggtgttgtctgcgccactccctgccccgggtttcatcctgcctgccttccgctctgtccgcatgggactgcccggggggtaccgggtcaccctcaggaacgccaggctctggcagaggaaggggtggcggctgcagccagtggctagggagcgcattctaggcctggcctatctcagtcaggaagctggcgtctggcgggggactgaggcccagggaccttgggggacccagctgatttgctccaggctcctcaccatgcccggagcctcgcctggttgggtaggcagggtccggggcctcacagggcttggggcaggtggggatgctgtgaggagggtccagaagggcaagcgggagctccagggatgaggaagctgcagtgaagagagtgggctaacggcagggcctccatggccacatccagggcctgcgggaattcgctgactgcccaatgtcacctgagcccctaaggcatgccggctgctggcccaggccctcaggacacggcagggagctatggcagagactttctgcttggccaaactccggctgggatctggaactttctcctaggcccatctgtgcacttgcttggaaaatccagttttagtaagagccctactgagtcagtttagccagaaccccacaccctggatatctcaccctcgatgacatccaaccaggtccctcatcctccaccatcacctggtgacgtctgatcaccctgcctgcctagagcaaggaccctgtgaggtgggtttagccagacccctcagccctgatgtctccttagtcattcccacccacagaccccacgctgctcctcggcttctccaccctctgccctgctgtgttggggttgagctccatctcccccaaggccgccaggcagggccccacaccacatgatgcgccttggtgcagtcttcctcactgatgttactacgcatcatgaggaatttttttattcaacagatacaaagacctctgcttgctgggactctgcaccataaggacacattgagtaagtcttctttggtgctttgagtggagggcagtggagaggggaatgtcaacagggtgcatgggccccaggaggccagcaaggcagggatggcttggaccagggcagtcagactctagggctgaaggctgctggggccaccttgtagatgtgtcacctactaccagggaaagtggccactgtacagggctgctcagcagggggtatgggacatcactcctcgagaaagcacggtggggtggatatgtcatagcagtgtgcggttcctgcctaaattgtcctctgtgagttcagctgtgaagagaggacgagagttattggaaggacgtcctgtggtctggaaggacgtcctgtgggaggacaggctgggctccaggggagcttggaatcctgcactgaagaggactatagacacatgatgggggtgaccctggcctgaaaaaagcagaagttaccaaggatgtgatttgaagctgtgattgtgtctcatcatgtcacactgattaggggtgcggaggggttgtgggctggatggtgcctgtccttatccgtggagacacttggggatggagcctcctgccacctgcagctgaagtcccaatggtccagcaaatgaaaaaaatgacacaacagccacacgtggacgctggcgaactggtaggaaagaggaagcggccgggtgcggtagctcacgcctgtaatcccagcactttgggaggccaaagccggtgaatcgcttgagcctaggagtttgagaccagcctggacaacatggggagaccatttctacaaaaaaaatacaaaaattagctggtgtggtggctagcgcctgtagttccagctactcaagaggctgaggagggaggactgcctgagctctggagcttgaggccagcctgggcaacataaccaagaccctgtctttacaaaaaataaaaataaaaataaaaataaaaataaaatgctgatacatgctagaccgtggatggactttgagaatactatgctgagtgaaataagccgtcgcaaacgacaaatcccgtaggattctgctcctgtgaggtccctagaggaggcacgctcatggagccagaaggtacaatgggagctccagggcctcgggagtgggtgtttaacagggagtttcaggttgggaggatgaagaggttctcgagatgagtgacggtgcccgacatgggtgggtgaaaacgaggaaggccaccgaatgggacatgggatggcgcttaagaggccggcagaaacctcgttacctaccgagggtggagcctgcgtgctgacggataggccgagtccccgccccgaaacacaccccgcgcacgatgctccgccccacacgcatgccccacccacccagcaggcacgctcgccccgcccgccccttccagctcgggaggccctgctcctcacgcacgcactctcagtcggcctcaaccggcgctgctccgcccctcaggcacgcacgttccgttcacccctcacgcacgcactctgcgcccgccccttcccgcctccctccggcggccaccgccaggggccgctgtggcacccgcccctcccgcttccttgggcccttcccgctgccccactcttgtccaagatggcgaccgc

SEQ ID NO: 97351 - DNA, 19499 bp, Homo sapiens
gcctctcctcagacaaaacccatcaccaccattaggtcacagagcaccctgtactttggtccaaaattgccaaggcattcattattaacagcactaaaggcagccctgcctccatttgggtgtattggtactcttttccaacttcattacaattctccccaaagcacctgaacctgcttctgggcaacagtgtttttatccacaactttcagctgtatatgctctgtggctgtcggtcaccctgctcccctcaccagcccaatgcttgctcaatgggcacatgaagaagccatgatggcagaggatggaagctaggaacttggcccaacagcataaacttccccttaccaaaactgaaaacctgactggctactgcctctgcccagtgtccaatttgccagcagcagtaatcaacacagagtgcctccacagctccttccttcaaaggcactggctggggatggatggataacttatattcgttatgggaggcatgcaacactgccctcacccttggaactgctgagaaagggtctccagccccattcacagcttcagtgatctgtccatatgaggaggaggcagagctgaagaggaatgtacatgggccacaacatgtcccctccccttcataccataacacaggcgctcagaagatacactggctcacatgcaccccacacacatgcacgtgtctacacttaacaacacacaagcatgtacacatgctgccagcctccccacaatccctcagttacacacatacacataagtgaccagacatctctgcaggggttgtgacctttcacgtgcattcgtctccttaagtttgtacactgaaccaggcccccagagctcactgatacccattctccaccccccagctgctctgttggctgttatttccaaagactccatcaggcacatctccatcctatctagagtgacacccaccagaggtggctacagacttgggccatgaagactacagtcactccatgatggagccatcttcatggcacatcccctagaccaggacaccccctcctcctcccacattccaaccattaaaaaattggacctctctctcttctgtccaagtcacttccccaccggagggtggcccttggctgacgcctggcaaataaggaacagtttgtggataaagcacccttgtgggcagaccggggagaagggaggttatgctttgagcctttccccacttgggtctatttttctattaagtatacattgcagtggataaaaaaaaaacacactagtatgaaataggaattaggaaaccttttttctagccccagcacactgccattcacaagctctctgactttggacaaattgctccctccctgagcctcagtttccccatctgtaaaatagcctccgagtttcagccctgctctaaaagtatcaggaattattcctaggcaaatcaatcttctttggaacaagaatcattacaagaagaaaactcattataatggcaactaatccatattcatctatttgctacatattatctttaaaactcttcttcatgccgtttgaatgcatgcccaatatctcaaaggtttgggctatatattcccacactacactaggggcttctggtgtgggactgtctctcccccatcaaactttgtgagcaggagcaaagcccacaacatttccctggaaaagcaagagtcaaagtggggtcaggacagacaccagaaaaaatcttggagtctctgtgctagaaactgtaagccacctgctgagcctcaaacccaattaattaccactcttttgaccctgccaatccctgttgtgtaagacctctctactctctatttctcccacttgctccccaatgatctagttccccaggtcccacctctcctgaatctctccagcccacccctccctgccggaaccccattcctgcctcaatcttccctgcttctgcactcaccagcccctgggccaaggacagagaacagcaacagcagcaatagggctggcggcagctgaaacccagacttgagtctaggctgggagaggggcagagtatgagagataggggggactagagggagagacttgggtaaacacagagatgagggcaaaggctgagataatgggttgggctgggctggacactggggcttgaacaagggcagggagtgggatggaaggaagggctgtgatggggactgcagcaagggacggggttgagccagggccttaagcaaacactgggaatggggctgggacagggcctgggctgggatttgtgacagggggtggaacgagggccgaggccgggatgggggccaggccaggggcagagactggaagggggtcctggatggggacccaggcaggggctggggccgatgtgggaagcggggcgagggcggggctgggggccaaggcggggattgggataggacgaggggccgggacaagggctgggccatggcccggggcgggggcggggccggacaggccagcgcggggcgctcgcagagctggcccgcggctccgctccccacccccggggggtggcctccggtgtcctcgcgggcccggggcgggggccggggacctgggtaggagttcaggcctgggcgactccgggctgcgctgaaccggcgataaccaggccccgcggcggcggcctcgacttgacgtcggcgtgacgccccgccccccggccggctcgattggtccctgtcagtaaagcccgcccccgccctactctattggtccccaacttagtcctgctgggcttcgaggacacacagactccgcccccgcctcagctacccgagaccctgcctttctcaccccaagcacagagcccgaggtcccctcagatcctcacagcccccaacgaccgccccacagatgtctcaaaggaaccctatcctcacaatcccagactcccccggacgtacgcacagatctccgcagatcctacccaaacactcgctcacagagatcccgcaacacacaccccacttttcagaagtaaaccctctgggctcgccccctcgaggcccaatgcaagcccctcaggagaccttacccaccggggaggtgaccagaccgccgttgccacggagactactaggcgttccggttgccctggtgaccggcgcctactctcctggcccgggttccggaggcttcagtcaagaccctccctcattggccctagaccccttgtccctacccacttccccaggtcatgccagagctcctttgcgaagttctgcagatatccaagtccccttcccagatagcagactttcaggcaaggcatttcaacactcagcacctgcaggtgaggcacatccacaaccaagagcctttcctccctgaggatcaacacctccccctgccatcctaagtcaaggtcttgacctaaggacttgtaacaaccaagccaaagcccagagggtaggtggtttctccaacggcccttgccctcttccctcaaagacatctgtctttctcccacccctcagtcccttcacattgttgtagtagtagtagtagtagtagtagtagtagtagtagtagtagtagttgttgttgttgttgttgttgttgttgttgttgttgttgtttgagacagagtctcgctctgtcccccaggctggagtgcagtggtgcgatctgggctcactgcaacctccgcctcccaggttcaagtgatttgcttgcttcagcctccccagtagctgggactacaggcgcctgccaccatgcccagctaatttttgtatttttagtagagactgggtttcaccatgttggccaggctggtctcgaactcctgacctcaagtgatccacccgccttggcctcccaaattctgggattactggcatgagccaccatgcctggcccacattctgtacttttcatccttactctcctcctccacccaatttcctcctccccttctctttccccttcctcacctcccatcttctggttctccactcttaggccccttttctctctagctgactctggtcatcttcctccctgtaatcctacctctgcccctaattcccttcccaaacatccccttcaaaaaggctctgatgcatttaaggagtgatatatctagcgtctctggaacatgggggtaaagtagggagcacggaaagttaaggcaggaatcctcaggctgtgttgaaaatgatgacaggccttgaatgccagggccaagaaatttggacttaatcctttagactgagtcatggaatgtttttaagccacaaagtgccagttgttgggcttgcactttagaaagatcctgattgggtcaggaaggaggactacatccttgcaggataaattaggtatatccccctccccaccgtatcctagactcaccccagaacaacatcaatttatttgtattgccattgttggttaatcggtctctctcctagactcaactcaatctagagcttagcacagcgggtcagtaaaagcatcagattaggctcattgtaaaagtataagttacataaatccatgaaagaatgggtgaatggattaaaatgctgtggatggaagtagaggggcaaagttattacacaaaggctgaagatgatgagaacttgaataaaattggaagggagaggagagaatgcatttggggaatatttagaagataggaaatagagttattggtgcctatttgaagatggagtctaagggaaaaggaaaagactaggataattcccaaagttcagttttgctgtctgtggaaacactcagttagaaatgaccagcaggggccaagcacggtggctcactcctgtaatctcagcactttgggaggccaagcagggcagatcacctgaggtcaggagttcaagaccagcctgaccaacatggtgaaaccccgtctctactaaaaatataaaacttagccgggcatggtggcacacgcctgtaattccagctacttgggaggctgaggcaggagaatcacttgaacccgggaggcggaggttgcagtgaaccgagattgcgccactgcactccagtctgggcaacagagcgagactccatcacaaaaagagaagagaagagaaggccagcaggcaggtgggtatgagtgtgaagtacagaggttgaaaaaggtctgagctagaaatgtgaatttaggagtcattggtacacaactggaagtagttaaagctttgaacatgaatgacatcattaagggaggaggatgtgtgtggtgcctagacaaaaccaggctgcgtgcagtgtcttgccttatgtgacagcattcccctgcactctcaggagccaaccccaactttggcttggtattgccagtctctagaactccatggtctgacctccagggttttaagatatgccaaggaccctgctcttggactgcccaagtggtgttgttcagactccctcctgggacatggttctctgctaccatctactgatgggattcgaactacttcagtctttcaatctttaagttccagctccctaacaagccacagcagcatgccatatgaggtctggacacatgggtgaaccttttggcatcacactctaggacccagagttcatgttgtttccctcttatatctcagctgcactgatatccttatccaaattccataatgcactgcgaaccctgggctctgccctgacttgccggccctctatttccaacctaatgaagcctgtaccctgttctaccactagatggaagcacatgagatcatagaagagcctcatatcaccatggatgcagagaagcaccccccttcaaaggacccctctgctgaggacttacaggagaaccatatctctgaaagcttcttgaagccttccacctctgagaccccgttagagccccatacctctgaatcccctttggtgccatccccttcccagatccccttagaggcccattcccctgaaacccatcaggagccttccatctctgagactccttcagagacccctacctatgaggcttcattggatagtcccatctcagtggtgccagagaaacaccttactcttcctccccaatcacgagactatgtctgtctgtcttcttctgatactctgaaggaagacctctcctctgagtcttcttccaatgaggtcccatggacaaggaggtctacccatctctctgaatctgagagccttccagaacactgtctttcaggcccttcatcccaggtccaagtggacacaaccgaaaagcaggaggaagaagcaggagaggttgaaaagggagtagatgccagtgacagcactgctcacacagcccaacctggacaccaactaggcaagaagaagaagaagaaaggagttagctgtaattgtacctgtcctctcccctgtcctgttctcactactattcactgtccttgacttgccccaggaggaggagactgggttactcttggacatggccccttctcttagttttaggrccttctcacttccccctggttactcatcctctcccatcctaggtaacacagcccgcccagtgttccctgctaggcagacagagctggtggaagtggctaaggcaatgcatagagaggagtttggtgctcaagtgaacaatcttttccagtgggagaaggatgcagccctgaatgccatccagacaggtgagcccatgtggcctttcagaggcctgtgacaggcccatgggcatcctctaatccaaaagatctgggaacctgaacattcagcagatagcttccccttttggaaatggctataccacctgcctggaaaaggagcaggcaagtgggccaaggaatacaagggtggatgcagacaaaaagtggggagattcatataaagcccaggtagagacaggtagctgaactaaaattattaaacacagaagggtcggctgggcgcggtggctcacgcctgtaatcccagcactttgggaggccgagatgggcggatcacgaggtcaggagatcgagactgtcctgggtaacacgatgaaaccccgtctctactgaaaatacaaaaaattagccgggcgtggtggcaggtgcctgtagtcccagctactcgggaggctgaggcaggagaatggcgtgaacccgggaggtggagcttgcagtgagccgagattgcgccactgcactccagcctgggcracagagcgagactccgtctcaaaaaaaaaaaaaaaccaaaaaacaaaaaacaaaaaaaaacagaagggtcatggcccaccccagatatagggcccagagagcctacagaccctaaagcagagatggcccaggaccctggacagtccccaggagacttgctgttctgacatgacaaagaccttagtccctttggtggaactccattaaaaggctgtcacccctgcatgccaggcccatgctgggtacccaaaagctttgagttctgttaccaaaggggagacctgtgtcctctggccctgctgtttccaagcctcagcctgtgattagtactcttgacagtcctgttagtggcatgctgcgtacagatgaacttgcaaaaacatgccatcctatgcatgagcatgcctacctgtgttatggaaattcatgtctatagggattaccttcagtaagagggccaccctgacctgctataaggattctggtctttctagactgaattcaatagatgttatgacatttattttggtccttcatacttcctttccctttatgatgggaatagagctacgatgacaggcctaaaacataaagacaagcaggtaattctaaatgcttatccctcctccatgaaatttactttcccctttcccatgcagggaccctccacctccccacccttgccctcccgccccaccaccaactttgtttgcttatgttaacatattcggttactcttattttcttgcaaattctggctggcaaggtggctcacatctgtaatcccaaaactttgggaggctgaggcaggaggatcacttaattgcccaggagttagacagtgaggacaagacagtgagaccctatctctacaaaaataaaataaaataatccagacatagtggtgcacacctgtggccccagctacttagtaggctgaggtgggcagattacttgagcccaggaggtcaaggctgcagtgagccgtgattgtgccagtgtattccagcctgggtgacagaatgtctcaaaaaaaaaaatgcaggatgtgttcagtcctcttattcccctactcagaacctcctgtctactccctactcctcaagsccactgtatttctttttcttcttcaaattgaacttcttcatcttcctgtttaaacaggaagttttataaagaaattcatgtcattcaaccccgaacaattatatttgaggtcccctcctaatagtggggatgttgagtcctgggtagtccataacagtatatgtgatgtgtacagaaatatcaagtgtaacctttgtttttattcattcgacaaacatttattgagcaccaactatgtgccaggcattgagctagctatggaagtggtaatgctgatgggggttcaaagacaaaatacttggcactctaatgagagataccaataagtacaaggacaattataattcactctaataattgctataatcaaggttatcctagackgctgcatgagcagaaaaaaaaggggcatcttatctggagtgcttgaggaatagtaagccttggaaggaatgacttctcagctgatatctgtaagatgagtaagaagaggtggccaagtaaagagtgctgtaagatgagacatgacagggcaaggcacagcaggaatctatagcaatgcactatgcctgatgcatagagtggtggggagaagagcccrctctgctctagaagggcagaattgtgcaggaatttctgtgccaagttaaaagctagaattatatcctgagggcaactgagagtcactagaaggttttaagtaggacaataacatgaacgaatttctgtttctgcaagatcactctggcaatagggtagactggagaaagacaagactggagttgtgaggctaagagaggaggtatggaaaggcaagtgaatacattgtgaggcactggtcataaccaggaaagaagtagatgggcttaggtggagagaagtggacaggttcaagaaatgctaacaggccgagcgcagcggctaccacctgtaatcccagcactttgggaggccaaggggtggatcacctgaggctaggagctcgagaccagcctggacaacatggtgaaaccccgtctctattaaaaatacaaaaaattagccgggtgtggtggcggacacctgtaatcccagctacttgggaggctgaggcaggagaattgcttgaacccaggaggtggaggttgcagtgagccgaggttgcaccactgcactccagcctaggcaacagagcgagactctgtcaaaaaagaaagaaaagaaacaagaaaagtagggaaaagaaaagaaaagctaacaaagtgaaactgaccattggaacagtggatgtataggataagagagagggaaatgcctggagtgccaccagtttttggcataagtaagtggtaggataatggtgccattaactgaatgcctagaaaagggtagatgcttggtaggcatgtgttggatgaacagaggacaaaggatgagagccaggtttggagggaataattgggcataagacatttgaagtgcttatgaaacatgctggcccaagagtctagtagacagctggctatatgggtctgaagctcaggagagagggctaggctggagacattgttcctgtaaagacagccatgtgttttatggagacatactatgcataaagagatgtcatcatgcaaatgtgattatgtgattgtggaactggactgtgttagacagaatcaaaatggcatcccaaataatgtctcctcccccgccaggccttgtccacccacaacaggaagggagtttggaatcaggacagagagtagagggtcccactggaatccacagccaccttccaattgtcccactttaagagcactaacacttgtaacasaatctgaagtatagttgccagtctccctgttcaaactccagtcttcttcatctgaatgctgggcactgattcctacactagtgcttggacttgactgccccccggccctccgagcaggccttgatctttgggcctcacctcctgcttttttaatgtatcctgctactccagacagaattcggaactcctctagtggaatcctggctcccgcccacctgcattgtgactgcctataccttgctctctcaacaaagcctccctggtgtaagggggcactggcactacaggcaatcagcatcaagacagaagaagcaaagccaaaagccacatctagacaggctttagatcctgacagactatgggtaagacaagaaaacttaatctgaggcacggaattgtgaattgtggccctgaccacagtcaaagaccagatgatgccactctccttattcatgttatggaacctcagggttatgcctgaatactggctctctcttcctcttgaaggaatgagctcaattgtttaatcaggcaatctacgttctctcagcaaccattttgtgccaggccttgtgctaggatgagagatacgggtgaaaagacagctcccttgaagaactcatggactaataggaatacaagggaatgatctattataatgcagtgtactgcaacaggagtagcacaaggagctatggatggcaataggaggggcccagacagacaggggaagtcagggacacctttttggtggaggtgacatttcagttgagcctttaattggractaagaatcctacacctggcagtcccactgcatggggcctcatacaggattcttggctagaagttggggtactctcagttctcatggagaatgagaaaatctgaattggaggtgccatctggttatcctccctcagttgcacagcaccaccctcacctcaagactagtcacgaagccagggattcagacctcactgctgaacaccagctctcgagggttgtgacctcttgctggtgcctactctcagggacacttcttagcctcactttcctttccacgcctccttgcttagcctcaaaatatataatttttggtcttcaccactcatgactgctacctacccctttctcctgacccttgaagaacctttggcagcccttcttaggtacacagagagcattggtacaatagcaccaggaacacagagggaggtattaaggtaccaacgtggagacgtgagaggaagccctcctcctaccttccagcaccagagctatccaacctccttctcctcttcaggaccttcaataaatatgctccttaggagccaatcccattgtctgtacatctggccaatcatcttccctttccctcaccttagacacttcaagaaaacaaagcaaagttgggctttagtgggatgaggagaggagatgagaatccctgtggtcacagagaactcagtgagattcatgttcatcctcaaacaaaatttcatctataatcttcctgctcagaaaccactctcttgagtcatctctggcaggctgacaaagatggagtagatcctgggtaggaagagaactgaagacacttctggggtaatgagaaaaccctgaggaaaaagaaaatctaaggggtagaggtgaggacttccaggtggagataaagatacctgggggtgrggagaggtaagttccccccaccccctcacctccatcaagggataggtaagaacacttcgggggagcttagaatttttttacttctcacttttaatcctgcatacctaggtctctacattggctggcgctgcccccattacctatgggactgtttccggattggggatgagtccagatgcttttgtggacacttgttgagagagcaccggatcatctcaggtaggggagaactgaccagcccctctcgagtgtggaggaataactgtactctgtcatgtcttgggaagtatgagagagagcatgtggctgggcacggtggctcacccctgtaatcccagcactttgggaggcggaggcgggtggatcaaaggtcaggagatcgagaccatcctggctaacacagtgaaacaccgtctctactaaaaaataaataaataaatacaaaaaatttagccaggcatggtggcacgcacctgtagtcccagctactcaggaggctgaggcaggagagtcacttgaagccaggaggcggaagttgcagtgaactgagatcatgccactgcactccagcctgggcgacagagcaaaactccatctcaaaaaaaaaaaaagcatgtctgcgtgcatagggggtggtggggatggaggatggggttggcatgagaaggcaaggtcctatcagattaaccctaccatccatccccaatcccacagacatatcggtgccctgcaagrtaagccagtgccgctgcttcatgttctgctttatcccatcacgcccagaggaggtgggtgagttctggctcaagagacgggccacctttgaccccaaggcctggagggcccaatgtcgctgcaaacacagccacgaagaacatgcagccactgggccccatccctgcaggcatcatggtaacttctagggcaagaggtgtattgggagcagggtwggtggggataggatgcaatctggggataatgayggagagcaggtatgagagccttgggcatgcrgtcactgaggaagagatgagaatgtggtcagctcctggggataccaccatttcctaaactcttcttggctgcacttttgccccaggctgttgctgyggctgttttgagtctaatttcctctgtgcggcctgtgaccggcgctgggaggaacacgagactttctytgacacccagaagacccggcaacgaggaggaaggcctcgcggtgaggcagaaacctgggacagggggccattccagggtctgtagtcagaaggccaggcaggaaggcactcccatcctcaaccatcccttccaggactagcgcgctccctcagcccacctccccaccacccacctacctgcatcccacatctgcactggttttcacccccaggagcagactatgtaccttttgcagagatggctgtgctccgagaagccatcctcagcaactctgacttcyaggccctgcagatacaggggccctctggccttcccagctcccaccctagtcccccggggctccctggytcacacggtctccagcctggcctcccttctgacccccatacctgaccctttcacctctgctctttcttcctccagggacagacactgtcagcaactggcacaggcctttgtgagtctggcccagatcagcaataaaagaggagtcattggaacctgacttggctctatatggggcaggtagatcccagcccagggagagactgcctaataacttagagttgacacctattagacacaggagaaagcctggatctggccatctgcctccatcacactcacattcaagctgcctgttgaaggaaagtggcttcaaggaagtcaagaagggaggaagtttcaagaaggatagagtgggaagtgatgttagatgcagttggggcaccaataagataaagactgaaaagtgtccattgggttttgcaattagaagatctttgggaacatcggagagtgcagtttcacactggtgcagtggaggcaggagtcaaacagcagtgagtttcaaggagtctcttaaagaagcttggatgaaaagtacaaaagtaaagtcagacaatatccagagggagttgtggagtcaaggaagtacttttgtaggaaggaaaaggggaagaggccagtagactaaaggaccttgaaggacccagaagagagagaagagatgcctggtgagacaagatcccagagatggaggaaagggatgaggtcaaagcagaggtgaagggattttctctggacaggagaaacaccacttcctatgaccaagacgaaggaagaggatggagccttcctagagtttcagggaacaagaacctgtggaagttcccctctgatggcttctatatgccctgtgaagtaggagataaggccaatggctggggtccaggggaagagggataagagtagggagcaggagacaagaagagaaaggggaaggtttgggaaggctaatgtagggaactggagaaaaacctcatcagtgggtagttcaggattcgggcacagttggaagtgagaacctagttagagaagcagagaatccaaatatttaatgggttgatgatgtgagggtgtcagggaggaagatcaggaaaactaagcaaaagaaggcatgaggatgtgaagggagcatacagcaccaatagggaaagaaagtgatgccaggaggcaaatgacagattgaaaaagggagcagtcaaaggaagagaagtctctaatgaggtacagtagcagacgtaggggcaggggttggagtacaagagacagtgttcagaggctgcagagcataacatctttcagatgagggcaagtgaaggtgataagtgcttgaagtagagaaaactgtgggccaaggatcaaaatcagtgaatgtgggaagtcacaagggagtccataggttcttatgggagtaggagattccagcactaatgggctctgtgaacccaggcaagtcactgtccctctttaggctgagtttctggacctgtaaaacaggaataacctctgtgttgcctactttctatgagaaccaaagaaataactaatttcaaagtgctttgtatccacctatcctccagactggcttccttcctcttcctagatcccagatccacttatctctcgcccttctccagggcaactctagggtctcccagtgtcccagaggcaccacagagaactgcagcctccggggcccagagaagaggccattctacatttcctcacaattaggggggccatctgttcctccaagggaaggaatgcaatctggactgctaggatccctggggaaaatcacagaatcaaatgtctgccctttagaggagaaaggattttctaacaataatatagctatacaaaagagattgttatatctctagaagcaaagttccccaacagtggttatatgccccatgataaccattcacctaaaactaattcaactaatagtcaacaatagagttaggattactatgataaactcattgaaggaaataataagcagccaatacaaactatatttacgtagactgtaaaaatatgaaaaattgattacacatgggttagtatcatatgcaatacatattacatattatgaaaaaaagacaggaaacaccaaatgttattcattcaacaattactgaccacctatatgtatcaggtcatgtgtttaaaaaaaaaaaaaagaaaaaaagaaaaaccaaagaaacagtggtaacttgtcctatgtgatatcagactaaaacttacctagcgtctgagaatattagtattttgtgaccccacgtttcttatgtcaaaaatatatattccagcagtgcaaacctgacttattggtgcctcatacctgtaatcccagcaccttgggaggccgaggcaggaggatcacgaggtcaggagatcgagaccatcctggctaacacggtgaaaccccgtctctaataaaaatacaaaaaattagccgggcgtggtggcgggtgcctgtagtcccagctactcgggaggctgaggcaggagaatggcgtgaactcgggaggcggagcttgcagtgagccgagatcgcgccactgcactccagcctgggcgacagagcgagactccgtctcaaaaaaaaaaaaaaagaaaaaagaaaaaaagaaaaaaaaagaaaacaccaggcaccgagctaactgtatcacacaccttttccgattagaaaagaacaatgaatacatactcctttgcttattataattcttgtgcggcaaatataggacactcttatctcctcctgctcaaaaaaaaaaaatgcaaaaaccacagactttttaatctatggagtgaatgcgttaacaagaacatagaattaaggaagaatttcccttagataagtacattaaaatctccaaaatgctcaagggactgaaactgcccttgtggagaaaatgctgcgcatcagccccgccagttaaaacaaacaaacaaaaacaaaaaaacacacctcatccccgttcacctttagccccaccccgggtggttcttggagccaataagcgccggatgccctcagagccccgccctcctcctggccaaagcggtgagagggtctaaaacagccctttctgcagcaggtgacggagccccgcccccttctccccgcgcaccaataggaaccagacctgaagaggacgaaccaagaacgaaaagaaccacccactcgggagccgcaacctagaagccagaattgtgtatcagattcaactaggagaaaatcccacctccaggctccattaatccttccaatggagtggaagtttctctcacagagaaactagtaaggggatccaatgggaaaagaacgttcacacggactagaagacgaaaccaatggaatggaaaattgtcctcgcgttggtagaagcagccaatgagatgaaaagagcccgcctccaaagtggctgcagaggcaatggggtgaatcgtgctcagaggcgcgctccaatggggtagcagggctcgcccggccgccactaccccgcttccccgcgcccggagtccccacccacggccggccgcggagccgagtgctgacccgggtgagaggttcccgcggctcagggaagatggcggcagccgtggtgctggctgctgggttgcgcgcggcgcgcagagccgtggcggccacgggggtgcgcggggggcaggtgagaagtggcgcgggagcgagtagggggtcctgcgggctccgaagccatccggggccagggggtcccgaaggcgcgcagagccgcgcagagctcctgcctgtggcctctgcccctccgaggcacaagctccggggctgtgtggtgaggtcgaactggtggctccggagaacgagctggtgctgattcccgccctgcgcaggccggggcgccgaggtcgggacagggtcagtgcagcggctgccgccttctttccactgcctgcagcccagctggcccgatgccccctgcaggaaatgagctttctcttcttggagccagtgctctgccctcctcaggcttctggcctcctaatgagcactagtgttaacctctcttctgcacttgccagaagcggctcggaggtcagagaattcattccgtcccgttctcccccaacgtgatgcaatgacatcagccttctctgaatcccttacccgaagttccctggggctaggggagcagaggtcacttagctgaactcttacctccactcattcaagggacaagagttaaaattcacagagtcacatgtgacacccagatgaggggtcaactagtgtcaaacagggcgattgcattaaaacttaaataaaacaggcgacaaggcttaaagatcagaaaacaagtaacggaaataagtggaaatgtactaacaaggtgagagtggaaagagattcaagccatcgcaagagattatggaaaccatccctttattttatattagaagctgagagaaggaatttatctgaggtaattcagtggtatggtaaggtaggaactgagaccaaaatccccagtctctcattctagatcctttccctaaacagtgctatatttcgtggacacatgagcaggaatcaattgcactgctgaatcctgataataataccgcctgttatctaaccaggtccagcaccttctggccctaccctttgctgctggtgctctgaaattcaggaactttcctcctgggtgggaacgatgaataggttattagaaggacgaaattaacaactatcagagcccagcttctgccagctccctcctttgaatatggtcgatccaccttcaggtccgaggagctgcaggtgtgactgatgggaatgaagtggccaaggcccagcaggcaactcctgggggagcagccccaaccatcttctcccggatcctggacaagagcctcccagctgacattctctatgaggaccagcaggtggggtgctcttaggacctatccccttaggaatgttgtagataccatccaacctgttgaagtaacgtggcctctggcctgtcacttcccccagtgtcttgtgttccgtgatgtggcccctcaggctcctgtgcacttcctggtcattcctaagaagcccattcctcggattagccaggctgaagaagaagaccagcaggtgggaagaacagggccagggtttggctgggaggagcccctggacccagctagaggtcttgctccctatgaatgaagccacctatgtccctccgctctctctatagcttctaggacacctactccttgtggccaagcagacagcaaaggctgagggcctgggagatggataccgacttggtgagtgacttttggcccttggtccctcacctatgaattctcattcctacttctcaatatgatcttcattcttcgacctctgccatgatcctgactccctaaccccaagctcaatttcagtgatcaacgatgggaagctgggtgcacaatctgtgtatcatctgcacattcatgtacttgggggccggcagctccagtggcctccaggttgaacctgccaactgattaaaggacaccagactctggatgcttggatggaaagggaaaaatggaccctgtgatgctaataaaactgttctcccttaattatgctctcctgtctttaatataaaattttataccacaaaggggaaagaaaactgattcagggctatgatgccccttgactggtctgagtgaaagacactgaggaggtccaacctgtggttaaatgttgcctgcagatatgtaagtcttcttgacaagtggtccaccctaggtcaagcttctagaaaagtaacagtaggaatgagcctaaatgagtaggaagaaactgaaagccaatcctggcccttcttcagaggtcaaaccaggttctaagggcgcttaggaggagggtggtcaatatgagggtcttttattagaggaggagtaatcacacccaaacaaaagcggctgccttttcactattctacgtctcaccattttgctcaagctagtttgtttattttcatccttaacatttgttaaagaccccactcacttttgagaatgaactaagcaaactaaggggaagctacttgcctctcagcaaacaccaagtaggctgtaatctaatgccacaaccctgtgcctgtt

SEQ ID NO: 97352 - DNA, 45517 bp, Homo sapiens
tggagtgcaatggcataatcttggctaaatgcaatctccgcctcctaggttcaagtgattccccagcctcagcttcccgagtagctggaattacaggcgcttgtcaccatgcctggctaatttttttatttttagtagagacagggtttcaccatgttggccaggctgatcgcaaactcctgacctcaggtgatccgcccaccttggcctcccaaactgctgagattacaggcatgagccaccgcacctggcccacaaagatattctttacaacattattcataatagaaaaaactgaaacaatgcaaatgtcaaaaaagaaaaattattatatgatagattattccctagaaattaagttttcaaaaatatttattaagaaaaattaacaatgatgtagttaatgaaaaaagcaggattaagaaaaactatgtacatctcaatgatgataaaaatatacatggaaaataatcagagggaaatatacctatatttaatactagttatcgcaaaatggtgggattactggtgatttcaattttatttctattattttctactttacaaatcttcactaatacacatgattttttaattttttgagacagggtctcaccctgccgctcaggctggagtgcagtggtgcaatcacagcacactgcagcctcgacctcccgtgctcaacccatcctcccacctaagcctccccagtaactgggactacaagtgtgcaccatgcctggctagttcttaaattttttgtagagatggggtgttgccatgttgtccaggctgatctcaaattcctgggttccagctatccacccacctcagcctccctaagtgctggaattacggacatgagccactatgcccagctgaattaattttattatgagaaaaaaattagttataaaatgttattacaaaaaagttatggtaaatgttttaatccattacaagaaataacatattaaggaacaagaatcagaatggcatattttcctcaataacaaccctagagattagaagacaatgaagtccgtgtgtgaaaataaagtctaaacccagctatcaattgagtatgatgattcaaacaaaaaaagacattgtcattcacacaaggacctcaaaaaatgtcgctctccaaggcaccatttcttaggaagccattggaggatgtgttccagtaaaataagaaaggaaaccaaaaaagaggaagaaatgtgattcggcaaacaatgaaacctaaccaggagattagagaaggaaagtcatggcatcatggctgtgctcaggcccacagagtaaaatccagactgaagcaagggaatgaaggactttgggagagaaaaaatgggagatttttaaagactaaaggatcatctgatacagatttaggcaggaaaaaaaccttgataaatgaacactgaaaattaaacgtatgaaaatataaggaaggtattaactgtaggaaaaataaaatgcaatacaagaaagaaaatgtaccaagaatatagtacttcatgcttttgtaaacatttagtatcacggtaaagtaaatgctgattatgcatttagcttaaaatatcaatataaccagattgggaagatgaaaggagcaggtaggaaagtggtatgagagatgaaatttcatctatcatataacaggaaatcaacaacatgtctaatatagataactcgagataaggcagtttaaaattgtttaggaaaatggaagttactatcagaaacagctaaaagagttaaagagttccctctgggaaataagagaggtacagaagagggctgctccttttcaataaaagactcttggtatatttgattttgaaaagtgtgtgtgtgtgtgtgtgtgtgtgtgtgtataaagggttaaaaaaattctaggctgggtgcggtggctcacgcctgtaatcccagcactttgggaggtcgaggcatggggatcacctgaggtcaggaattcgagaccagcctggccaaggtggtgaaaccccacctctactaaaaatacaaaaattcactgggcatggtggtgcacacctgtaatcccagctactagggaggctgaggcaggagaattgcttgaatctgggaggcagaggttgcagtgagccgagattgcaccacttcactccagccttggcaacaagagtgaaactccgtctcaaaaacaaaaaacaaacaaacaaaaattctgaataccttcagccaaaaaatggaaatcaacactaaaattacaaaaatacatagaacacagtgaaaagaaacatttcttataaaaatctattggacaagctacagaggaacattcaatagtacttactctttttctgatttaaaaacaaaagacaaaaaaagcacatttacttaagaagggaaaagagaaagtagggtgcagatttaataaacatactatatatattcattacatataaaccaaaataaactaataaaatgtgtatttatttatttatttatttatttttgagacagtctcgctctgttgcccaggctggagtgcagtgccacaatctcagctcaatgcaacctccacctccctggttcaagtgattctcctgcctcagcctcccaagtagctgagattagaggtgcacaccaccatgcccagttaacttttgcatttttagtagagacagggttttaccacgttggtcaggctggtctcgaattcctgacctcaagtgatctgcccacctcagcctcccaaaatgctgggattacagggtgagccagcgtgccaggccataaaacgtatattttaaaaaaagaactggccaggcacggtgaatcatgcctgtaatactagcactttgggaggccgaggcgggagaatcacttgagctcagcagtttgagaccagcctgggcaacatggcgaaacctcatctctacaaaaacttcaaaaagctagccaggcgtggaggcgtgcacctatagttccagctatctgggaggctgaggcaggaggatcactggagccctgaaggttgaggcttcagtgagccataatcatgccactgcactccagcctggacaatagacagagccagaccctgtctcaaaaagaaccactggttctttggaaagataaaatagatgcctcaggcaagcctggttaaaaaggaaagagagaaagtgaaaatacacaatattagaaaggaggaatatacagaatatatagatatgcatacagaatggatacagaatgcaaagataaaaataattctaagagaacattttgcaacttaggggcagtaaattgaaaatctaaaagaaataaaggctgtaattccagtactttgggaggcagagatgggcggatcatttgagccacaaggagttcaagaccagcctgagcaacatggaaagaccccatttctacaaaaattagctgggcatagtggtgtgcacctgtggtcccagctactcgggagtctgaggcaagaggagcacttgagccttaggaggttgaggctacagtgaatcgtgatggtaacaccacattccagcctgggaggcagagcaagactgtctcaaaaaaaaaaaaaaaaagacagttctcccatgagctggtccaaactgttccacctttagaatcaaattatttataaaataaataagtgaaattttaaaaatacattatttcctaggaaacaatttgacaatatacagtgaaatccagaaaacccaagaactctagtaaagaaaactattaggccgggcatggtggctcacacctgtaatcccagcactttgggaggccaaggtgggctggtcatctgaggtcgggagttcgagaccagcctgaacaacatggagaaacactgtcactactaaaaatacaaaattagacaggtgtggtggcgcatgcctgtaatcccagctactcaggagactgaggcaggagaatcgcttgagctcgggaggcagagattgcagtgagccaagatcgcgccattgcactccagcctaggcaacaagggcaaaactccgtctcaaaaaagaaaagaaaagaaaactgaatgctcaataaatattggataaacaaatgaatgagccaaaagactaaatgaaggctgggcgcagtggctcatgcctataatcccagcactttgggaggctgaggcaggcagataacgaggtcaggagttcaagaccagcctggccaacatggtgaaaccctgcatctctactaaaaactgcaaaaattagctgggtgtggtggcacacacctatagtcccagctactcgggaggctgaggcaggagaatcattggaacctgggaggtggaggttgcagtgagccgagattgcgccactgcactccagcctgggtgatggagtgagactcagtctcagaaaaaaaaaaaaaaaaaagactaaatgagtaaatggtaaatgagtgagcaagattccactttggaccatagcaattatagaaatactataacgtaatttggttatgataggcaattcttttttttttttttttttcttttcttgagatggagtcttgctctgtcaccaggctgcaatgtagcggcactaccttggctcactgcaatttctgcctcctgagttcaagcaattctcctgcctcagcctccagagtagctgggattataggtgtgtgccaccacatccagctaattattgtatttttagtagagacagagtttcaccatgttggccaggatggtctcaatctcctgacctcgtgatccgcctgtctcagcctcccaaaatgctaggattataggtgtgagccactgtgcccggctatgataggcaattctatgaagaggtagtaaaatagagaatctcctgaaaataaattgtattgcaacctacctatttctatccaacttttaggactgcctttttccttacagattcagggaagcagagagtagagaagagaatgacttatacagtgattattgagagacatcatcaatggcccctcatcaatgctcattatatctgcctgtcacaattcctaaaatttccccattagagagttattcctttggccgggcacagtggctcacacatgtaatcccagcactttggaaggccaaggcaggcagatcacctgcagtcaggagtttgagaccagactggccaacatggtgaaaccttgtctctactaaaaatacaaaagttagccgggcgggtggtgagcacctgtaatcccagctacttgggaggctgaggcaggaaaatcgcttgaacctgggaggcggaggttgcagtgagccgagatcacaccattgcactccaccctgggtgacagagtgagactccatctgaaaaaaaagaaaaaaagagagttattcctttgagctccttttcttctaatcctctccttaaagtacattgagatatatatgtaaacagatgccctcacaacaaacatcaaataagtacacaaaagagacatggagatacggagagagaagaggcttttaaaaataaaatcagaggccagggcagtggctcatgcctgtaatcccagcactttgggaggctgaggcaggtggatcataaggtcaagagattgagaccatcctggctaaaatggtgaaacctcgtctctactaaaaatacaaaaattagctgggcatggtggcgcgtgcctgtagtcccagctactcgggaggctgaggcaggagaatcgcttgaacccaggaggcagaggttgcagtgagccaagatagcgtcactgcactccagtctggtgacagagcgagactctctctcaaaaaatataaataaataaataaaataaaatcggaagctttcagagtttgtagcaaatttcccccctttcccaatgtggagaaaagtattaacagtattaacagcttcaaacattagataaagttaaagttatgaataaaatgcaatcattttcattatcaaaggaatgcttatacttcaggaaattcttactttcttcctgtccaagtctaatctctcttgaaaaagtccttgatctcaatttttctttctagacatttcaagggtcttttttgttcccaatacttttttcttcagcttgggatgattcttgagcaccttcttcttaaagatgatgcagctgctctagtcacttagtgagcatctggatttcctgctgaaaggctttagttctctgtaagaaaaagacattaaaaacttcctcatgctctatgcttgcttgcccttccccccgcccccccgcccgctttctttctttcttaagacagagtctcgctctttcacccaggctggagtgcagtggtgccacgttggctcacggtaacctccgcctcccaggttcaagcaattatcctgtctcagcctcccaagtagctggcactacaggtgcatgccaccatgccaggctaatttttgtatttttggtagagacggggttttgccatattggtcaggctggtctcgaactcctgaattcaggtgatctgcccaccttagcctcccaaagtgctgggattacaggcgtgagcctacgcacccagcctccatgctttctacgtagtttcaaaactatgtgcaagttctatttatatccacattggagtggcattaagttactaagtagattaatacaggcgattttaggatttgacatgtatacattggtttaaaaaataaatagaaagcttcgatatataaaaataagacattttagtcagtactgagaaataaggctgtataatgaattttaaaaragcagagtatttttaaaaatggggaactctaaacaggctactgtgtagcaggtttcactaacacactgaatctaagccatatacaggcgtccctagcgtccctgggagactggtgtcagaacctcctagagatgccaaaatttatgaatactcaagtctttgatacaaaatggtattgtgcttgtatctaacctattcacatcctcctgtacactttaaatcatctcaattttttttttttttttttttgagaggaagactcgctctggtcccccgggctggagtgcaatggcgcgatctcggctcactgcaacctctgtctctcgggagacttttataatacctaatataacgtaaatgttatgtaaatagttgtactctgttgtttagagaataatgaaaaggaagaatgtctgtacatgttcagtacagatgcaatttttttttttttttgagacagtcttggccgggcacggtggctcacgcttgtaatcccagcactttgggaggccgagacgggcggatcacgaggtcaggagatcgagaccatcctggctaacacggtgaaaccccgtctctactaaaaatacaaaaarttagccaggcgtggtggtgggcgcctgtagtcccagctacttgggaggctgaggcaggagaatggcgtgaacctgggaggcggagcttgcagtgagccgagattgcgccactgcgctctagcctgggcgactgagcgagacttcgtctcaaaaaaaaaaaaaaaaagagacagtcttgatttgttgcccgggctagagtgtagtggtgagatgtcggcccattgcaacctccacctcctgggttcaagcaattctcatccctcagcctcccgagtagctgggactacaagtgcaagccaccaccacccagctgatttttgtatttttagtagagatgggtttttgtcatgttggccaggctggtctcaaactcctggcctcaagcggtccacccgcctcagcctcccaaagtgctgggactacagatgtgagccaccatgccttgttgtgatgcaattttttatttttacttggttgaatccacagatatggaggactaactgtacctattatcatttgaattttaaagtgaggagtcatgaatatactaaaatgatctggacayaaatgagatatatccacttaaacatgctgattcaatcatttgatagacttgaccagtaaattaaaacaaactggcaattaattttaggttatcatgtaaacactatctttaacataccactattttgatatttattgaacttacactaaactaagcatttatcatgtattaacccatttggtccttgcaaccactctgtgaggtgggaactacacaccgtcccctacttcacaaatgaaaatgaggcacagagaggataagtagtctgcccaagagcacacacagctggcaaatggcagagctaggcttcatgctggggctctgcactcttaataaacatgctacactacttccaatataataatgaacagcctcttctcttctttcactgtaatagtaaaactagaattataactataattcagagccacagagtttcctaaattgackgatattaaaatctacatcataaaaraatcaaactggaaagaataacttttatatctatatacttacagatttccaagatttctcatttgcaccaatttcccaaatcctctctctcacagcctcctctgtggctggtaaggagacaatactgtcatgcagaagaatgctgtcccgcaataaccaactgaccaaggaaattctgatgttgggactgcagttttattttcccagttgaatgaatatggacgtctgtctaactcgatgcttgcttttctttagggttcaaatcttgttgacatttatcccaaattttctgctcattttttggtccttcagagtgaatagtattgtcctgtcaaagttcttgtccaggatagcttcactcttaccctaaataagccaatatacaggttaaacttcccgtttgaaatttaatactgagacatctatttcccttcttttgaaatatcaagtcatagcacaaaacttcaggagaaaagaccctcaatggaatgagttagtcatggccaggcactgtggctcaygcctggaatcccagcactttgtggggccaaggcgggtggatcctctgaggtcaggagttcaagaccagcctgaccagcatggtgaaaccccgtctctactaaaaatacaaaaattatctgggtgtggtggcaggtgcctgtaatcccagttattcgggaagctgaggtaggagaattgcttgaacttgggaggcggaggttgcagtgagcagagatggtgccattgcactccagcctgggcgacgagagagaaactccatctcaaaaaaaaagtcaatcacataagtaagacaaggacatactcaaaacagcaaactagaacagcaagaggtattgaaatgatagtatggagaaactgctttgagaatacaagaaaattagcttagaggagcagctaammaaagagtcccacttgataagggtaaactcattacagaaaaatgtgagctaataagtgtataagaaatgatagaaattttaaaaatcagcatttttgaaatgccttgccttttgaaataagattcaggcaaagaccatcaatgaatgctaagatcattaagtgaaaagtttatgaagatttaattatggttatagaatacaatttaaataacaatttcaataatgtaaaagtgaaagaagtcacatttcttttccccaacctttcccctgcactcttgtaatcatcctgtttccattagaaatatgacaggaaaaaaacaataataatgttctacttctttctccaaactcccacaggagaattctaccaaatcttctttgttttgttttgttttgttttgttttgttttgagacagagtctcactgtgtcgcccaggttggagtgtggtgccatcattgctcactgtagcctccacctcctgggctcaagcaatcctcccaacttggcctcctgagtagctgggaccacaggtgtgcactaccacacccagctaattttttcttttttttttttgtagagacagggtctcactatgttccccaggctagtctcgaactcctggcctcaagcgatcctcctgycttggcctcccaaattgttaggattataggcgtgagccaccaggcctagcctgtctaggattcttaccaccttcttgccaccttcaacctcgggagctgagtaagcaagttcagtttctgggcttcttgtcgtgtaaaaccaagacataraaggaaagctggaattgttaaagtaatgataagtttgcatcactaaaagccttggaaaaacaagcagcataaaagaagaaaagatcagagctgtatggactctaattctgagagagttattcagagatcttagagattagtgacwtttttttttttttttttttgagatggagtcttgctctgtctcccaggctggagtgcaatggcacaacctcagctcactgcaacctccgtctcccaggttcaagcgattcccctgcttcagcttccctagtagatgagattacaggcacctgccacygtgcccagctaatttttttgtatttttagtagaggtggggttttgccatgttggccaggctggtctcaaactcctgacttcaggtgatccacctgcctctgcctcccaaagtgctgggattacaggtgtgagccaccatgcccggtctgtttttttttttttttttttttttttttgagacagttttgctcttgttgcccaggctggagtgcaatggtgccatctcggctcaatgcaacctccacctcccggggttcaagcgattctccttcctcagcctcctaagtagctggaattacaggtgcccaccaccatacctggctaatttttgtatttagtagagacagggtttcaccgtgttggtcaggctggtctcgaactcctgacctcaggtgatccacccgcctcggcttcccaaagtgctgggattacagatgtgagccaccgcacccagcctagtgacagcattttttttttaaagaaagtgttatcattaattacttgagagaggcaaataaagattgggattactttaaacaaatttgaaagtcattggccaggtgtggtggctcacgcctgtaatcctagcactttgggagatcaaggcaggaggatcacttgagcccaggagtttgagacaagcctgggcaacatggtgaaaccccgtctctccacaaaatacaggaaaattagccgggcatggtggcgcacgccagtagtcccaactaaattaccgaggatgctgaggtgagaagatggcttgagcccaggaggcagaggtttcagtgagccaagattgcaccaacccactccagcctgggtgacagagtgagactccatctcaaaaaaaaaaaaaggaaagtagttgctgaactttttaaagggaaccctgcacattatttragtcatataggaccttgttttacatgcagatyatataacaaacttatagtctaaggatttctttcttttttttgagatggagtttcgcccttattgcccaggcaggagtgcaatggcgcgatcttggctcaccacaacctccgcctcccagattcaagtgattctcctgcctcagcctcccaagtagctgggattacaggcatgcaccaccacgcctggctaattttgtatttttaataaagaccgagtttcttcatgttggtcaggctggtctcgaactcctgacctcaggtgatccgcccgcctcggcctcccaaagtgctgggattacaggtgtgacccactgagcccggcatagtctaaggatttcaaaataaacttttactatctccttgacaataatctgtctcccatcctcctctaccagacttctgtaacactttctgcttatcatatgaatcactgtctattggagaccagcctcatttccttcttctaaacccaactcataccctaattctagatgtcaatggccaatgtagataacccactaaacaatttatctatcacagagatgatactgaagacccttcagccaggtgcggtggctcatgcctgtaatcccagcactttgggaggccgaggtgggtggatcatttaaggtcaggagtttgagaccagcctggctaacatggtgaaaccccgtctctactagaaatgtaaaaattagccgggcgtggtggcacatgcctgtaatcccagatactttggaggctgaggcaggagaatcacttgaacccaggaggcggagcttgcagtgagcagagatcactccactgcactccagcctcggcaacagagcgagacttcatctcaaacaaaacaaaacaaaaaaacagaaatgcttctagtctgccatgctgtactgcttctcttgatcctcctttaagaagaagaccaacaaactactcaacatttatcaattatctcctggaataacccaaggtaataaaaatcatgtttcttcaaaaagcaataaaaatttctcctcacctttgccatgaaaatatccaagaaatcttattgtccattcatatgcatataagggatgaatctgttagtgcctgagaacaacaactccaaaaagtctgcttttctctctgccttttctctttcaaccagatgtactcgtactctgtgtaagatatcagtaggcaacaatatcatgaaaccaactcagccaatcttcaaatttcaacttaaaataacaaaaagagccaacgactccaatatggtgtattgagcaagtcctatgcagagcccaaaggtgctactatggcttccagcggggtccccattggcactgccaactgggcaaatgaagctcccaaaattccagacaatgtgggagattggcttcagggaatctactgctttgccacccatagcaatgatttctggaggaacttgatcctcaatttgggactccttgctttcagagtttggctggccaggaacttgagtgacgttgacctcatggtgttagaggaacctctccttaccagacctctggtttggtaaaacatggccagagtgactccaccttgaaatgagtagctaggcactctgtaaggttaatgcttgtggtctgaaaatagccacatcccaagctgaccaccaattataattacagaatattggtggccatacagaacatctcccaccaatcctgcagaatgtccagatgtcctaagagtgtagcccacttyattaaagatgccattaatgagcaggcttaggttgaaagattaatggtcatctataacaccaatagcccctacctttagtgagcacatctgcatgttccaagtttaattatagcttctcataagtttcttataaatagagacactaacaaggatggcgtgttcctcctcctgctttctggcgataactwactcagtaacattgtatgaacttgctttttctctgtgctgtgtgacttcccttgaattatttcctgtgcaagatccagtaacctgctcttggggtctggattgggaccctcttttctggcaacagtgtacctcaggcagaggtgtagccaagtagacaaatggaatcctgcgctatacccaaaccttccaaaaacagagcctacaacttgtgaccaccacaagatatcctgatggccgctgaagtttgcttcagatgggcgccttccctttccctgcctagtttycttttattccttgagccctctcagaattccattctctggtcagtagtcagccttcagttaaagcatcgcccctgttctgtaaagttctgtgcatagttcctaagcttctgcaggggatgatctttgctcttactctgaggaataacaatgattttttgtttgtttgttcatttgtttatttgttttttgagacaaagtttcactcttgttgctcagactggcatgcaatggcgcaatgttgggtcactgcaacctccgcctcctgggttcaggtgattctcctgcctcagcctcctgagtagctgggattacaggcatgcaccaccactcctgactaattttttgtatttttagtggagatggggtttcaccatcttggccaggctggtcttgaactcctgacctcggttgatccacctgccgcggcctcccaaagtgctgagattacaggcataagccaccacaccyggccctaaaatatatttcttatgaaaggagctgtgcagttatccaagtgtttctagagagagatcagaaatggtagagaaatgggcctggtgcagtggctsactcctgtaatcccagcacttcaggaggctgaggccagtggatcgcttgagcccaggagttagaaaccagcctgggcaacacagcaagaccctgtcccaaaaagaaatggtaggctgggtgcagtggctcacgcctgtaatcccagcactttgggaggccgaggtgggcgggtcacctgaggttgcaacatggagaaacaccgtctctactaaaaatacaaaattagcctggcgtggtggcgcatgcctgtaatcccagctactcgggaggctgaggcaggagaattgcttgaacccrggagacagaggttgtggtgagccaagattgcaccagtgcactccagcctgggcaaaaagagagaaactccacctcggaaaaaaggaaaaaaaaagaaagaaagaaatcgtagagaaatgaagagaaaaacaatyctgtgttaagtcctgcaatatttcccatgggggaggtcaattttgaagccattctttttaaggtgaaatttgggtgtgaatagctgcctgctgctactggtaatattgtgacaatcaggaggttctgtcagaggcattagaaccagagcaactccatcttgaataggggctgggtaaagtaaggctcagaactactggctgcattcccaggagcttaggcattcttagtcacaggatgagataggaggtcagcacaagatacagaccacaaagaccctgctgatgaaacagaatgcgataaagatagcccaaacctaccaaaaccaagatggtgacaaaggtgacctctggttgtcctcagtgctcattatacactaattataatgcattagcatgytaaaagactctcccactagggccatgacagtttataaataccatggcaacatcaggaagttaccctatacagtctaaaaaaagaaggaaccctcagttccgasaaatgcctgccccttttccagaaaactgatgaataatccaccccttgtttagcatataatcaagaaataactgagtatactcagttaagcagcccatactgtgactctacctatggagtagccattctttattcctttactttcccaataaacttgctttcactttatggatttgcccctaattctttcttgcgtraggtccaagaaccctctcttggggtctagattgggacccattcccggtaacagttccacatagatgcagctttctttagggtaatattcacattacccaaatgtcatttttttatttttaataacatctttctgtgttcttatatgtaaaatatatctctttttaaacatttttaaattttggagacagggtcttgctatgttgctcaggctggtctcaaactggtcccaagctatcctcctgcctcagcctcccaagtatctgggactataggtggcgtctggctacagtatgtttccttctttttttttatttgagacagagtctcgctctgtcacccaggctggagtgcagtggcaggatcttggctcactgcaagctctgcctcctgggttgacccattctcctgcctcagcctccygagtagctgggactacaggtgcccrccaccacacccggctaatttttttgtgtttttagtagagacggggtttcaccatgttagccaggatggtctcgatctcctgacctcgtgatccgcccgcctcagcctcccaaggtgctggaattacaggcgtgagccactgcacccggcctacagtatgtttcttgaaaaatgcttagcattagttttcttttttwaaatcttgtcttgtactgaaatgattatactgaaaccgcctgtgcaaaattatgcctgagacagtgaaagagatctaacttaactgaccccatcttgtttctaacctccaaactgtccttgtgcattcctgggtgtaggctgaactaactttgggagaaacttactttatagtttatagtttaaaacaaagatgacagccctttcccaaagcagccctccttcttgcctggagactagattgccttggtaggactaacattaaccacaagattagaaattatggtttaggagtcttgcagctggaggctacaagattctgaccctccctaaactgctcctaagatcagtgcttgagatattttgcagaccctgcatttgatgggtcagctggcaccacgtagattgataacctgactcatctgatcttgcagtccccacccaggaattgactcagctcaagaagacagcttccattccctatgatttcagctctgaccaatcagcactcccagctyactggcttcctcccacccaacatgttgtccttaaaaattctgaaggcggaatgcttgtggatactgatttgagtaataataaaactctggtctcccatacagccagctctgcgtgaatttatctttctctattgcaattcccctgtcttgagaaatcgtctctgtctaggcagcgggcaaggtgaacccattgggcagttacaataccatctatctttaaagttattattgaaattgtcgggtttatcatgttatttattgtttttaccatctattctctgttcctttactactactctaccattttaatttggattaataaagtttttgtttgtttgtttgtttgttttttgagagggagtctcactctgtcgcccaggctggaatgcagtggtgtgatcgctgctcactgcacctccgccgccctgggttcaagtgattctcgtgtctcagcctcctgagtagctcagattataggcatgctctaatttttttttttttttttgagacagaatctcgctctgtcgccagattgcaatgcagtggcatgatctcagctcactgcaacctgattccctggttcaagcaattctcctgcctcagcttccagagtagctggaattacaggcatgtgccaccatgcccagttaattcttgtatttttagtagagacagggtttcaccatgttggccaggatggtctcgatctcctgacctcmtgatccaccygtctcagcctcccaaagtgctgggattacaggcatgagccactgcgcccggccaggcatgctctactttgcccaggtatttttagtagagacggggtttcatcatgttggccaggctggtctggaactcctggcctcaagtggtccacccgcctcggcctcccaaagtgctgggattacaggcatgagccaccgcgcccggccttggattaataaagttttttatttcatttttcttccatattaagtttttaatatcttttaaattattatttagttgttaagctggattttgtgattacataatgcatatttgatttattacrtgcyttttttttttttttttttgagagtctcgctttgtcgcccaggctggagtgcagtgacaggatctcggctcactgcaacctccgcctcccacgtgcaagctattctcatgcttcagcctcccaagtagctgggattacagacgtgtgccaccacacctggctaatttttgtatttttagtagaggtggggtttcaccatgttggccaggctgatctcgaactcttgacctcaagtgatccgccctccttagcctcccaaggtactcggattacaggtgtgagctaccccgcccggcctattacattctactttaatacttttgtgatactccctaaataaaacacttatgatagcttaactccatttaccatttcttgcccttgtactactgatatgttttactytttcatatattataaattgtataggatttttaaaaattaattgtcagtattaatttctatttaccctttctttactccttattctaccctacatttctctgtagccaccaaggatcattttccttcatcctgaaaaattgcctggtgtgtttcttaatagtgtagttcttctgacaataaatgatttctttttttttcttctgaaaccatgtttatttcatcttcaatttttttttttttttttttttttttttgagacggagtctcactctcgcccaggctggagtgcagtggcgcgatctcggctcactgcaagctccgcctcctgggttcacgccattctcccgcctcagcctcccgagtagctgggactacaggcacccgttaccatgcccggctaattttttttgtatttttagtactgacggggtttcaccatgttagccaggatgatctcgatctcctgacctcgtgatccgcccgcctcggcctcccaaagtgctaggattacaggcgtgagccaccgcgcccggcctcatcttcaattttgaaggataatttcactgagtatagattctgggttgtcagtattttttctttcagcactttaagatgccattcaattatcttctgacttttggctgggcacagtggctcatgcctataatcccagcaccttgggaggctgaggtggaaggatagcttgagcccagcagttcaagaccagcctgggcaacaaagtgagaccttgtatctacaaaaaatttttaaaaaattagctgggcatggtggcatgtgcctgtggtccctgctactcaggaggctgagtcaggagcatcacttatgcccaggtgtttgaggttgcagtaagccatgatcgtaccactacactccagtgtgggtgacagaggaagatcccatctcaaaaaaaggaactgcctcagcaattatgaaggctggcaattcccaagatctgctgggatctgggagacccaggggagccaataatgtagtttgagtctaagtttgaaggcctgaaaatcaagagagctratagtgtagctccagtccaaaggycagcaggctcaagacccaggaagagccaatggtttgagtccaaaggcaggaaaaagagctgatgtcccattttgaaggccatcaggcaggaagaattcgctcttacctgggggagggttaatctttttgttctattcaggcctttaactcagtggatgaggcctactcacaatagggagtatcatctgctttactcagtataccaatttaaatgttaaaattatccaaaacactctcacagaaacacctaaaataatgtttgaccatatattgggcaccctatggcccagtcaagtagacatataaaattaatcctcatagtatgccatatagccattgtttctctttasctctgaggacaaaaacaaaaagtctgtagtatactatgttacgttcaaaactgagttgaagagtttacctgattagctgttaagggtcgagctatagctaacttcatgtgcttgcttaacactgagaagatatttggatgatgaatttcttttaatcagtctttcacttgaactttgtgagwtctttttattcatacactctctgcacaaccagaaaaaagcaaaccccattttccttgtttcaggcccttaagtttaactaatatctcaatctgagtaaaggtttgtttcttttttcaattttagtctcctatataatttcttttaaaaagtagtctgggcgcagtggtttacgcctgtaatcccagcactttgaaagtctgaggtgggtggcttgcctgaggtcaggagttcgagaccagcctggccaacatggtgaaaccccatctctactaaaaatacaaaaattagctgggcagagtggcgtgcacctgtcgtcccagctacttgggaggctgaggcaggagaatcgcttgaacctgggaggcagaggttgcagtgagccaagatcactctactgcactccagcctcggcracagagtgagattccgactmcaacmaaccaaccaaccaaccaaccaaccaaccaaccaacaaacaaacaaaaagtgacttggtataaatacagcaaaagaaaaaaaagtgttttgagaaatgcaagactcagaagagccccaacctatgagatgacctgatrcatactaaccaatacaaaatagaaataggctacagtagtgtgcacatctgaatagaatagcttttcatattgtgtgagtttctcaaatattattcttattataagaggaaaaattaatgactttgtttctcctgtcaactgagggcacattatcaaatatctcctctctctgtataccaactaatacaataagtctaacaataacaaattctatagaggataaaatcacatgattatttcagtaagatgcaaaaaaaaaaaaagcattggacaaaaaatccaacacacttttgtgattaaaaacactcaacaatatttgggtgtggtggctcacgcctataattccagcactttgggaggccaaggcaagtgggtagcctgaacccaggagtttgagacaagcctaggcaacatggcaaaaccccatctctactaaaaatgcaaaaattagtcaggcatggtggttcactcctgtaatctcagctacaggaggctgaggcaggggaattgcttgagcctgggaggcagaagttgttgtgagctgtgatcgtgccactgcactccagcctggatgacagagtatgactccatctcaaaaataataataatagtaaatttttaaaaacccacatatttgcagattcatagtcttgtatggagaaaatcccaaggaaaccacacacacataccaaaaaaaccctagagctaataagtgagttcagcaagcttgcaggacaaagactgatatacacgaatcaattgtatttctactctctaaaaataaacaatcaaaaaatgaaatatggaaacagtttcatttacaatgcataaaaggaataaaatattagtaataaatttaacaaaagaaatgtaacacacatacactgaaaactacaaaacattgttaaaacaatttaaagaggctgggtgtggtggtgcatgcctgtaatctcagtgctttggaaggccaaggcagtaagattgattgaggccaggagtttgagaccagcctgggtaacacagcaagaccccaaatctatataaaaaaaaaattaaaaattagccaagcatggaggcatgcatctgtagtcctatctacttgggaagctgaggcaggaggattgcttgagcccaggaattcaagattacactgaactatgattgtgccactgcactgcagcctgggtaacagagtgagaccctgtctctaagaaaaagaaaaagaaggccaggcgcggtggctcacgcctgtwatcccagcactttgggaggccaaggcgggtggatcacaaggtcaggagttcaagaccagtctggctaacatggtgaaaccctgtctctactaaaaatacaaaaattagctgggcatggtggtgagcatctgtaatcctagcaattcaggaggctgaggcaggagaattgcttgaacccaggaggcagaggttgcagtgagccgagatcgtgccactgcactccagcctggacgacagagcatgacgccatctcggggaaaaaaaaaaaaagaaattaaagaagacttaaataaatggaaaaatattccatgttcatggaaaagctgatcttaaaatacatatggaaaagcaagggacccaaaatagccagaatgatcttgaaaaaaatgarattaagttggaatttttcacacttacccatttcaaaacttactacaaagctacattaatcaagacagtgtggtgctggtataaggacagacatacagaccaatgaaatagaattgggtgcccaaagataaacccatacatttatggtcaattgattcttggcaagaatgccaagatagttccacagaggtgctaaggacaactggatatttatatgaaaaacaatgaatctggactcctacctcacatcatacataaaaatttgccaaaagaagtcaaagacataaatgtaagtgctaaaactataactttatagttatattttataactaaaactatagttaattataaactaactatagttttagaaagactatggctttttttttgtttttgtttttgtttttttttttgagacggagtctcgctctgccgcccaggctggaggtgcattggtgcgatctcggctcactgcaagccccgcctcccgggttcacgccattctcctgcctcagcctcccgactagctgggaccacaggcgcccgccaccacgcccgcctaattttttgtattttttagtagagacggggtttcaccttgttagccaggatggtctcgatctccttattctcgtgatccgcccgcctcggcctcccaaagtgctgggattacaggcgtgagscaccgcgcctggctcaaactaactatagttttaactaaaaactatatataaactaactgtagttttagttagttagttagttagttgctctgtcacccaggctggagtgcagtgtcacccaggctggggtgcagtcacccagtctggagtacacctgtcttgctctgtcacccaggctggagtgcagtggcacaatcttggctcactgcaacctccaccttctgggttcaagcaattctcctgcttcagccttccacgtagctgggactacaggtgtgcaccaccatgtccagctattattattattattattattattattattgttattttgagacagagtctcgttctatcacccgggctgaagtgtagtggcatgatctcaattcactgccacctctgcctcctgggttcaagcaattctcccgcctcagcctcccgagtagctgaaattacaggtgcgtgccaccacgcccagctgatttttgtatttttagtagagacagggttttaccatgttggccaggctggtctccaatgcctggcctcaaattatctgcccatctcggcctcccagagtgctgggattacaggcatgagtcactgtgcccagcctaagttttgtacttttagtagagatcaggttttgttatgtcagcccggctggtctcaaactcctggcctaaagttatccacctgccttggcctcccmaaatgctgggattataggcatgagccaccacgcccagccaaaactataaatctttttttttttttgagacagagtctgtcggccaggctggagtgccgtggcatgattttggcccactgcaacctctgtctcccgggctcaagctattcttctgcctcagcctcacgagcagctgggattacaggcgtgtgccaccatgctcagctaatttttgtatttttagtagggacggagtttcaccatgttggccaggctggtctcgaactccacctgccttggcctcccaaagtgctggaattacaggcatgagccaccacgcccggccaaaactataactcttaaaagaaaatatagatgtaaatctttcatgatcctggatttgacaataatttctcagctatgacaccaaagacacacatacacatmcacacacacacacacacacaactccatcaaaattaaaatttttgcttgaaatgacacttttaggaaagtggaaagatgacccacaaattgggagaaaatatttacaaattatacacttaataaaagtccagtatccagaaaatataaagaacacttacaactcagcaataaaaagmcaacccaattttaaaagggacaacaaatatgaataggtatttctacaaagaagatatacacatggccaataagcacatgaagagatgttcaatgtattagtctgttcttgcacttctgtaaagaaatgcttcagactaggtaatttacaaagaaaagaggtttaattggctcacagttccacaggctgcatgggaagcatggctagggaagcctcaggaaacttacaatcatggcagaaggtgarggggaagcaggcacatcttacatggccagagcagaaggaatagagtgaggtgagaggtgctacacacttttaaacaaccagatctcatggyaactcactcactatcatgagaacagcaccaraggggaaatacacccccatgatccaatcagctcccaccaggccctaacactggggattatactttgacatcagatttgggcagggacacagactcaagccttatcccattctcccactgggccctctcaaatctcatgtccttctcacatttcaaaatacaatctgccttcccaacagttcccccaaagttctaactcattccagcattaactcaaaagcccaaagaacaaagtctcatctgaracaaggcaagtcccttctgcctgtgagcccgtaaaatccaaaacaagttagtaacttcgggctgggcacggtggctcatgcctgtaatcccagcactttgggaggccaaggccggtggatcacctgaagtcaggagttggagactagcctggccaacatggtgaaacccccatctctgctaaaaatacaaaaattagccgggggtggtggtgcatgcctgtgatctcagctacttgggaggccgaggcaggagaatcacttgaacccgggaggcagaggttgcagtgagccgagattgtgccattgcattccagcctgggcaacagagcaagactctgtctcaaacaacaacaacaacaacaacaacaaaacaagttagtgacttccgaaatataatgggaattgcaggcattgggtaaatactctcattccaaaagggagaatttggccaaaagaaagaggctataggccccatgcaagttcaaaatccagcaggtcaatcattaaatcttttttttttttttttttttttttttgagacagagtttcactcttgctgctcaggctggagtgcaatggcatgatctcagctcaccacaacctcmgcctcctggatttaagctattctcctgcctcagcctcctgagtagctgggattacaggcacctgcctgtagttagtagagatggggtttcgccatgttggccaggctggtctcgaactcctgaccttgtgatccgcctgtctcggcctcccaaagtgctgggatctcaggcatgagccaccgtgcccagccgggcatgggtttttttttgcagtggggggtggggaggtgtgatgaaattgttctgaaattagacagtggtgatgattgtacaaccattgaattgtacactttaactgaatcttgaggtatgtaagttatatctcaaattggattttttttttttagacagagtctcgcacctcctggattcaagtgattcttctacctcagcctcctgagtagctgggattacaggtgcatgccaccatgcccagctaattttttgtatttttagtagagacagggttttgtcatgttggccaggctggttttgaactcctgacctcaagtgattcaccagccctggcctcccaaagtgctgggattataggcatgagccaccacacctggcccgaggtatttaagttatatctcaatacaaaatataataatgttgggtcaggtattaagtgaaattctgcagatttaaattctatgatcaatcaggagtatggagttcatatgctatttgcaagcttacaacaaaagacatgtttgaaaacaaactggaaaaatccctaccttagacagtttctagctcaataattcatttagttaaattccagttgcctctttgaagcctctgaatattggtgtttctcaaatatttaattctggttagagaagcagtaagtttctgtaggtccttgatattatctttcagggacattatctggaacgactgtcgtacattattttctttgtaactttctagctcaggcttcaactcttgcagtgaagtttcttttatgaaaagtttgttctgaagatttcttagctaatgagaaagtgttaaaatcatttataattttgtttttaaaaacttcataatgttaggtcacatttaaattatacatttattattattatttttgaggcatggtctcactcttgtcacccagtttggagtacaatggcgatcacagctcactgcagccttgacctcccaggcycaggtgatcctcccatctcagcctccccagtagctgggactacaggtaggtgccactacgcccggctaatttttttaatgattatttgtagagatggagtcttactatgttgtcaggctggtcttgaactcctaagctcaagagatcctccygcctcagactcccatagtgttgggattacaggcatgagccactgtgctctgctgctactaacattttttttttttttcagacagggtctagctctgtcacccaggctggagtgcagtgctatgatcctggctccccgcagcctctgcctcctgggttcaagcgattctcatgcctcagcctcccaaatagctaggattacaggtatgcaccaccacacctggcaaattttttttttttttagtagagatgtggtttcaccttgttggccaggctgctctcaaactcctgacctcaagtgatccacctgcctcagcttcccaaagtgctgggattataggtgtgagccacagcgcccgtcctgctactttaacttgttagttcacatttcttaatagcctgcatgtgatctggagaactagtaagagagtagaaaaaaaaattgaggacactgtgaaagattaccagcttgataaccagaaacgttcagaagcattttgtatttgacaaaaaattacattaattagaaactatatttcctagcagcaaaggctgtatgaagaccattttatttatttatttatttatttttgaaacagagtctcactctgttgcccaggctggagtgaagtggcacactctcggctcactgcaagctctgcctcctgggttcaagcaattctcctgcctcagcttcccaagcacctgggattacaggtgtgcacaaccactcccagctaatttttgtatttttagtagagacmgtatatccaaagtgctgggatwacaggcatgagccacygcccccagccaagtatgtaacatttttgaaatcacattttagaaatggaaaagggattagtggttgtcaatagytggggatgagaaggaagtggatgtggatacaaaagggctacctgaaggatacttgtgatgttagaactgttcagtatattgactagttatatcgaacttaatacacaaacacacaattgaatacaagtaaaactggggaaatctgaataaactcagtggattgtattaatgtcaatattcaygctgttacattagactataattttgcaaaattttacctttgggggacactgggctaagtatacaagtgatatctctgaattatttcttataatggcaagtgaatctacaattatctcagtaaaattttcaattaaaaatgataacaggccatgagcrgtggctcatgcctgtaataccagcatttgggagactgaggcgggtggatcatttgaggtcaggagttcgagcccgtctacatttgctttgacaaacagattcaaaaaattacaatgagcaaataayttatcgacatgtacagagctgcttttaaaaaatattttggaattcttgaaactagcttatatattttctttaaacaaggtacctacaatcttttttgacaatttggtttaaaaagtttttaatgaattatgcatagacataaatcttaatctaatccaaatctgaattatcaaaaattataaacttcttagcattagtagtaagttaatactatagtaagtacagggaaaraagaatgctacccataattaaattgctacacatttcagggactggcatcacattttgctgaaagaaaagacaaatgtaagacatctctcaaaggtatcatcagatatattgtgtttatacaagttccatttaagtttaagctttattagcttttctatgccaaaagagggaaagcattaacataagtaaaatggaaatatatatatatatatatatatatatatatatatatataaaatcccagcactttgggaggccaaggtaggaggatcacttgagcccaggaattcaatatcagcctgggcaagatagtgagacacatctttacaaaaaaacaaagaaaaaaaaatagctgggcatggtggcaagcacctgtggtcccagctactyaggaagctgaggcaggagaatcacttgaggctaagagatcaaggctgcagagatccgtgattgtgccactggatttctttttttaggatcagagaatggaaaaaaargsgggggggcatttagaaactgtgcaatggaggggttgcatgtaagtgcggtgtgtttctgctgggtggtgtctcccaaaaaatcaaacaggcccaaaatgagaggaattttcatacgaagaggaaaaaatcaggattatgtgatttgaggaatgtagaacaggaggcatagggcttgactttcttttactaatcctgaaatctgttttcaaattcttctaattcattctaggtgtattggtattgcaggcagctattaaagtataaatatctctaggctggacgtggtggctcatgcctgtaatctcagcgctttaggaggctgaggtggacagatctcttgakcccaggagtttgagaccagcctgggcaacatggcgaaatctcatctttatacacgaaaaagcacaaaaattagccaggcatggtggcatgcacctgtagtcccagctgctcgggatgctgaggtgggaggattgcttgggcccctgagttcaaggctgcagggaaccataatggagccactacactccagcctgggtgacagagcgagaccttgtctcaaataaaataaaataagaataaaaaaaaaaatctataatgagactagtctcttttctcattttcattacttgatacctaagaaaattactctattaattctttttccaagacctaaagaagaaaatcaaagaacttaaattttagtagacgaaaatgaagaatgaactgtttctcagtcctagaacaagaatgatactggagacaaarttctttatttttcaagatggagttttttgctcttggcacccaggctggagtggaatgatgtgatctcggctcactgcaacctccgcctcctgggttcaagcgattctcctgcctcagcctcccgagtagctgggattataggcacccgccagcatgcccagctaatttttgtatttttagagagacagggttttgccatgttggccaggctggtctcaaactcctgacctcaggtgatccacccacctcggcctcccaaagtgctgggattacaggcatgagccaccacgccyggcctgacaaagttcttaagaatttcatcctttacttttatttctatttctttaccattttatgaaacttgtgctgtattgactttacttaatgagtttcactcacactgtctctaagaaacaagctactagggaggctgaggcaggagaatcgcttgaacccaggaggyggaggttgcagtgagccgagatcgcgccactgcactctagcctgggcaacagagcaaaactctgcctcaaaaaataaaaaagaaaaagaaaaaaaagaaaaaagaaacaagctaccgtgtgggacaaaatataaaccaagaaggatgaacatataaatcctccagtataagttcaagtaccatctcctccagggagttttcttgattcctaaaaggtaagggtaatctcttctcttatagtatgtgattttcttttgactgttgtctcattcaatattatactatgtaaaaatctcatctcctctactacattaaatgtatctaggccagggcagtggttcatgcctgcaatcctagtacttcaggaggctggggtgggaggatcacttgagaccaggagtttgagatcagtctggccaaccaagtgagatcctgtctctatgaaaattttaataattagccagaggtggtggtgtgcacctgtaatctcagttacttgggaggctgaggtggaggatggcttgagccaggagttagtctgtagtaagctatgattgtgccaccagcctgggtgacagagtaagaccctgtctccaaacaaacaaacaaataaaggtacctaaaaacaggagctatttctgttatctttatcatcccataccaggcacaaaaaatatggatcgtaaaatgaaagaaccaaacaggggaaaaaccttaatgaaaaaccttaatgcaaagttaactaatatagatgatgatagtgctattctcccaaactaaccttataaagatacaataaaaatgtattaggaatctaaagtaaaaataaaatatagcaccrttacatgattattctgtgattttaggtttgtacatgactactttattttttacacactcaaaagatgtagtatgctatgctgcatttagtaagaagtgaaaagtataaatttttaccacatcagactctggagaaaattccaaatacaaggccagtttccagaagagacctgaattgtccaacatgagtagctgctctgagcaatttgcctgtagaatgtttgcatatcaaagaagctgttgctaggtgaacacatcacagaggtacaaagaaaaaggaccttctaaagtgttacagtaaaacctgtagctctggctgggcgcagtggctcacgcctgtaatcccagcactttgggaggccaaggcgggtggatcacaaggtcaagagattgagaccatcctggccaatatggtgaaaccctgtctctattaaaagtataaaaattagctgggcgtggtggcaggcgcctgtagtcccagctactcrggaggctgaggcaggaraatcgcttgaacccgggaggcggaggttgcagtgagctgagatcacgccattgcactccagcctgggagacagagcaagacaccatctcaaaacaacaacaacaacaacaaaaacatgtagctctttctccaattaatgaagtgaaaacacaaatgattttcatcaagcattagtactttaagtaatcttaagaaagtgatcccmccaaaagtgaacagtccagtaaacgtgaaaatcatattttgggcttcttttgtgaaattcttggctaggtcaaatattgtactccaatacatacatctcatcaaggtagaagtrcttcgaaagaaggggaaatgatgtttccatttactattcctaaagcattagatgtgttaaaaaactgggattctggccaggcgcggtggctcacgcctgtaatcccaacactttggaaggctgaggcgggcggatcacgaagtcaggagctcgagactaacctgaccaacatagtgaaaccctgtctctactaaaaatacaaaaattagccaggcgtggtggtgcacgcctgtaatcccagctactcagggggctgaggcaggagaattgcttgaacctgggaggtggaggttgcagtgagccgagatcatgccattgcactccagcttgggcaacagagcaagacttcatctcaaaaataaataaataaataaaggccgagtgcagtggctcatgcttgtaattccagcactttgggagaatgagctgggtggatcacctgacgtcaggagttcgagaccagcttggccaacatggtaaaacccagtctctactaaaaatacaaaaattagctgggcatggtggcaggtgcctgtaatcccagctattcgggaggctgaggcaggaggattgcttgaactcaggaggcagaggttgcaatgagccgagatcatggcattgcactccagcctgggcgacaggagtgaaactctgtctcaaaaacaaacaaacaaacaaacaaacaaaacaaaaaaaacccctgcgattctaattctaggaaattctttttttttttttttttttttctgagacagagttttgatctgtcacccaggctggagtgcagtgctgcaatatcrgctcactgcaacctctgcctcccgggttcaaaggattctcctgcctcagcctcttgagtagctgggactacaggcacgtgccaccatgcctggctaattttttctatttttagtagagactgggtttcaccatgttggccagactggtcttgaactcctggcctcaagtgatcygccgcctccgtctcccaaagtgctaggattacaggcgtgagccactgcgcctggccttaggaaaatatttttacagcagaaaaagtatgtcccaaatttgtatttttgataccagaatcaccaggaattttattcaaacatcatcttatcttcaaagaataatgaaccttgaacccacccaagttctgacttagttggtcaagggtggaacctagacataaatatattttttaaagctatacaagttggtctaatgtgaatttactgctaaattcactataattgaagacagtgcccactgtctacaatyatgtatgataaaaattaagkggggagaaacaagttatgttcataggaatgagagtwatagataataactaaacaaagagaagaagaaataggccgggcgcagtggctcacacctgtaatcccagcactttgggaggccgaggtgggcagatcacaaggtcaggagttcgagaccagcctggccaacatagtgaaaccccatctgyactaaaaatacaaaaattagcagggcatggtggctcacgcctatagttccaactactcgggaggctgaggcaggagaattgcttgaacccgggaggctgaggttgcggtgagccaagattgtgccactgtactccagcctgggcaatagagtgagaatccatctaataaaaaaaaaaaaagaaatactctgtttttcctctaaaacaagatttttaaaaatatgtttctggcctggcgtggtggctcacgcctgtaatcccagcatttgagagactgaggcaggtggatcacctgaggtcaggagtttataattataatatataaaaatatatatataatgtatgtaatatatacatataaacatatatatgtttccaagctgcaggtatttaagtataaacagacaggaaatctcttataaagcttaaattctggcagggcacagtgactcatgcttgtaatcccagcactttgtgaggccgaggcaggcagactacctgaggtcaagagctcgagaccagcctgaccaacatggagaaactctgtctctactaaaaatacaaaattagccaggcatggtggcacgtgcctgtaattccaactactctggaggctgaggcaggagaattgcttgaacccggggggcagaggttgtggtgagccgagatcacgccattgcactccagtctgggcaacaagagtgaaactccatctctctatatataatttaaaatatatctattatatatattaaacatatatatatgtttcgaagctgcaggtatataagtatgaacaagacaggaaatctcttataaagtttaaattctggctgggtgctgtggctcacgcctgtaatcccaacactttgggaggccaaggctgacggatctcctgaggtcaggagtttgagaccagcytgaccaacatggtgamaccctgctgtactaaaaatgcaaaaattagctgggcatggtggcacatgcctgtaatcccagctacttgggaggctgaggcaggaggattgattgaacccaggaggcagaggttgcagtgagctgagatcgcaccactgcactccagtctgggcaacagagcaagactccatctcaaaacaaacaaacaaacaaacaaacaaaaaaagcttaaaaattaaattctggtgtaaaagacaggtagcaaacaaaaatataaagaaataaagtcattttagatggtagtaagtgctatgaataaaacaggttaatgagatagtaatggggatgtaratggagaggtaacttttgatagtgtaatcaaagaaggcctttttttggatatagcaacataatattatacattttattaacctgtctttatcatttaaaaatgtataaaagctggtcacgcgtggtgggtgatgcctgtaatcccaacacttttggaggtgggtggatcacctgaggtcaggagtttgagacaagcctcgccaatatggcgaaaccctgtctctactaaacatacaaaaattacctgggcgtggtggcgggcgcctgtattcccagcttactcaggaggctgaggcaggagaatcacttgaacctgagaagcggagcctagatctcaccattgcattccagcctgggtgacaagaacgaaattccatctcaaaaaaaaaagtatgaaagctatcttacatgtctatacatatgtatctgctgttcctttaacaactgcatccatcctgacagaaattttgttttttgctattgaaatcagtgttgtgattaacagttttacacatggtttttttgttttgtttagttttagtttttgtttttttgagatggagtttcgcttttgttgctcaggctggagtgcaatggtgtaatcttggctcactgcaaccttcgtctcctgggtttaagctatcctcctgcctcagcctcccgagtagctgggattacaggggctggccaccacgcccagctaatttttgtatttttagtagagatggggtttcgccatgttagccaggttggtcttgaactcctgacctcagttgatccaccagcctcggccttccaaagtgctgggattacaggcgtgaaccactgcacccagcctatacatctttctttatatgtaaatattactttaagataaattcctaaactgggagaggtggctcacgcctgtaatcccaacgttttggaaggtcaaggtgggaggatggtttgaggccaggagttggagaccagtctgggcaacatagcaagactatctctacaggaaaattttttaattaatcaggggtggtggcatgtgcctatagtcccaactactcagaaggatcactttagcccaggagttcagggttgcagtgagctgattgtgttactgcactccagcctgggtgacagagtaaaatcctgtccaaaaaaaaaaaatcctggaagtggaattacaatgtcaaagaaaatacaaatttaaaattttcgggccaggtatggtggttcacacctgtaccaatcccagcactttgggaggccaaggaaggcagatcacgaggtcaagattgagaccatcctggccaacatggtgaaaccccgtctctactaaaaatacaaaaattagctgggtgtggtggcgcccacctgtagtcccagctacttgggaggctgaggcagaagaattgcttgaacctgggaggcggaggtttcagtgagccgagatcatgccactgcactccagcctggtgacagagcgactcaaaaaaaaaaacatttttttcccgtagatattatcatatcaaattacccctgaaaaaggttgtaaaaacggggcctctgcaaaaagtaaacattttttctagcaactgcctttataagcatttaaataaaaatattttttccttctatttgctgtgaaaggttgattttcattctttatttgaccaatttgcaacacttgacagaattaattacctctttttccatgaaacacattcttcacttgtcttgttttttttttttgtttgtttacttgtttgtttttgagacagagtctcactctgttgctcaggctggagtgcagtggcactatctcggctcactgcaaactctgccccctgagttcaagcagttctcctgcctcagcctccctagtagctgggattacaggcacgcgctaccacacctggctaatttttgtatttttatagagacggaggtttcgccatgtttgtcaggctggtctagaactcctgacctcaagtgatccacccaccttggcctcccaaagtgctgggattacaggcatgagacaccatgccaggcctcctcacttgtmttctaaggtgggatgctcttggggttttccttagaacacactggactctcctttccttttaagagacagggtcttgctctgttgcctaggttggagtgcagtgtgatgattatagcttactgaagtttccaactcctaggctcacaggatcctcccacctcagccttctgagtaactgggactacaggtacatgccaccacgcccagctaactttttaaatttttatttatttatttattttgagatggagtctcgctctgtctcccaggctggagtgcagtggcgtgatctcggctcactgcaacctctgcctcctaggttcaagggattctcctgcctcggcctcccgagtagctgggattacaggtgccagccatcacgcccagctaatttttgtatttttagtagagacggggtttcactgtgttggccaagttggtctcaaactcctgacctcagctgatccacccacctcggcctccaaaatgctcggattacaggcaaattttttaatttttatttttgtagagacagggtcttgctatgttgctaaggctgttctacaaactcctggattcaagtgatcttcctgtatttggtctcccaaagtgctgggattagtaaaggtgtagccacagctcccagctggactctccttttcaatcttccctcttggttcctcctgtctccttgcattctgaacactgaaaggttctaggtgtcagtctttggtcctctctctacctacaatacccttggttggatctcattcaatcccatggatttaaatatcttctctccatttggatgtctaagagaaatctaaaaatgtctaaagccgaattcataatcttaaccccaaaacctagtcctacattttactttatttcaactcagcgaatggcaattccatctttccagttgctcagagcaaatccctgctttctttcttttacattccaagttcctctcttcattaaggtttctgctgaagtcagatgcccaaagaaatctcttaccacatttctgagacaaaactttcccacctcccagcatcactgcctatcctcttagcttgcctatttttaaaatatagcatgtcataatctctaaaattagcctatgtatttctttaacttgatcgttgtctcctccaccagaatatgagctgagagcagaaactttgctggttcactagggtatctctagcatctatagcagtgctgttggcatagtggccactcaataattatttgctccatgaatgaacgatttatgcaactcatacatagataactgtcaaaaaccaggctgttgagatggcaaaggcagtagatttagagaagaaacatcaggtttggggcctataccagccacagctatgcagctttgggtattatccttcaaagtctatccctctgtaaaaygggatttctgccatcttcctcaacaaataagaaagctggaatagtcaatacctatttgatagtataagacaaaagattcactatctgcaatttaccagaaacatttccttcaattttcttcttaatttcacttgtttaggtacaacacaatatgagacaatgtgttttagggttattattataatgacattatattactaagtctgtgcctttaacatatcacttgtgcaaactttaagaatagtaactttaaggccacgcacggtggctcatgcccattatcccagcattttgggaggccaagggagactaatcccttgagatctagaccagtctggtcaacatagtgaaaccccaactctaccaaaaatagaaaaattagccggcgtggtggcatgcacctgtggtccaagctactcggggggctgaggtgggaggatcatttgaacccgggaggcagaggctacaaagagcggagatcatgccactgcactccaccctgagcgacatagcgagactccgtctcaaaaacaaaaaaacatatattagaaataattaccagaaatagaaaatcacaagagattatctaatcccgtatatggggctactataaataacctcagaatttagaaataagaaaaaaatattaaaagccccaaaattaataaaaaatcagttttaggccaggtgcggtggctcacgcctgtaatcccagcactctgggaggccgaggcgggtggatcacgaggtcaggagttcaagaccakcctrgccaagatggtgaaaccccgtctctactaaaaatacaaaaattagccgggcgtggtggcgggctaattaggtggtgcctgtaatcccagctactcgggaggctgaggcagagaactgcttgaacccgggaagcggaggttgcagtgagccaaaatcgtgccactgcactccagcctgggcgacagaatgagactccgtctcaaacaaacaaacaaaaaaagttttagatgagctctgccagtagtaaacggcttgtaaaagaaacccggtatctggtcaagtcctaagtgacctgaaccacgcatcttcaggactctactgggatgactgtaacctgaacgcggttcctagagcagagcaagcatattccttggactcagtaacacaaggggccagtcctctccagcatcccagctgccaccgccctgtcaggctccccaggcaattgtccatcttactccttctccagcgtggacgcttaaggggagggagcatccctcctcgagggtcaactggcatgtagcttacgaagaccgcgtgagttctccaaccccagacttgctgcggggcggggacgtgggggtgacaaaatccagactacgaccctccatgagccctggcaaccccggggtgaccccaacaccgatgaggccacgcgcgctccagctctgacactccttccagatcggcggggcctgaaacagcgggctaagcttcacctacggctgagcgtcagattcagctgaggagattctaaaagcgctatgctgggcccagacccaggccctccagagcagaacgcggaggggcccgaccccagtctggtggcgtaggtgtgtgacaaagtatgagggcgcgccaagctctccagttccacatctgctgtcgagtccagcgcctgccacgctcccgtgcggggacccgcccaaaactccctggaagccaggcgattcagaccccgccaccgcgtccccagagactgggcggaaaccggagwctcgcctcccgaacccgcgaaactatctcccgcgagactkccccgccccaaccccgccccgcaactctactccctgatkggctggaattacggccgsattccggagtcctttccagctccctcttcggccgggtttcccgccgaatacaaaggcgcactgtgaactggctctttctttccgccaatcatttccgccagccattcatcaccgattttcttcatcttcccctccctcttccgtcccgcagtccccgacctgttagctctcggttagttaagggactcgggtccttccgaactgcgcatgcgccaccgcgtctgcagggggagaagcgggcaggggcgcaggcgcagtagtgtgatcccctggccagtccctaagcacgtgggttgggttgtcctgcttggctgcggagggagtggaacctcgatattggtggtgtccatcgtgggcagcggactaataaaggccatggcgccagcagaaatcctgaacgggaaggagatctccgcgtaagcacctgacattgttgttgagtgtggggctgtggacgagggctctgagggtgtgcaggtcccccggacccattttttgcgggagggacacttgtagcggaagagttaggcccataacacctgaagacctgcagccaaagaaagagaacccgggcacaacctgcgtttgcaagtggactgcctagtggctgtagccgctggctcctgtgcttcggggaaaagtcctgtgccgactatgctcccaaacgcgcagctgctggtgactttctgccgggagagtgggtagttgcggcttcctggagcccccctagtcagaactcagaaatccaatctacttaattcccgttaatttggaggtgagtagatggagactagtgaggtgacaaggcttgacaagactacaaggctgataatgacagagggtccttccagctcatagcttttcccactataccatagtcttatcatacgctaagtgaaatctaatacatttttcctttctcttcaatctcgtgcttctctctaacagccatctctctgccctggtcctagagttacttgaaacgtaatttggctcctgagtcctgagaatattctgcattccacttgacctctgcctgttctacccttgcgggacatctgaatgcttaattagtgggtatcgttgccagctttactcccaggaagtaacactggctgctttttgtctgggaggtgactggtgaggaaaaatgagagtagaaggaagagggaaaaatatattccctctagtagatgaaggagggaaagatatattctgtgtgaccttactgagtttgctcttgggacctttcacatcacccgttatgtaagtaactgttgccagccacagcagttactaaattgtaattgtcctgtaactcctaactttgtaataggtttttgagtgaattacaaagtcatcggtggtgaaaagtccgggcccagtggctcatgcctgtaatcccagcactttgggaggccgaggtgggtggatcacctgaggtctggagttcaagaccagcctatccaaaatggtgaaaccccatctctactaaaaatacaaaaaattagccgagtgtggtggcaggcatctgtaatcccagctacttgggaggctgaggcaggagaatcacttgaacctggggggcagaggttgcagtgagctgagatgcgccattgcactccagcctgggcaacaagagcgaaactccgtctaagaaaaaaaaaaaaagaaatcacaatacttactgcttagtgcttttcaacatgtggcttgctaaactgtatttctgctttactttctgtttttgtttgcttgtattcaaacttacttccttttccagtggctttttgttttaatataaaaatcttccttttagaaagactgattgtgaagagataatttagtgcataataatagtgcagataatttagtacaataataatgcatctgggccagtactgagaataggtgctcactgaatatactttcgttaattggagagcaaattaaatatgtttatcaactccataagggcaaatacatgtattgtcttatttttgtctatatcctaaacacctggaaaccctgtttcctgccttactacttgtgtggttttaagcaaattaattaacctttctgtgccaaagtttcctcaaatgttaagtaaaagtaatgtctaggtcattgggatgttagtagaattaaatgggttcctaacagatgatcatttataattcttcctggcacataataagtattcgatatatgttgtattaataatcagtaattagttaatgtatatatgaatgattcattatctttttttttttttacatggtagctgctgccttgagatctatttttttttttgagatgaagtcttgctgtgtccaatcttggctcactgcaacctctgcctcctgcatacaagcaattctctcatatcagcctcctgagtacctgggattacaggtgcccgccatcacgcctagctaatttttttttttgagatggagtttcactcgtcgcccagactggagtacaatggcgtgatctcggctcactgcaacctctgcctcctgggttcaagcgattctcctgcctcagcctcccaagtagctgggattacaggcgtccgccaccatgtccagctagtttgtttgtttgtttgagacagagtttcactcttgttgcccaggctggagtgcaatggcatgatcttggctcactgcaacctccacctcccaggttcaagcgattctcctgcctcagcctcccgagtagctgagactacaggtgtgtgccaccccgtccggctaatttttgtatttttagtagagacgggctttcaccatgttggtcaggctggtctgtaactcctgaccccatgtgatccacccacctcggcctcccaaagtgctgggattacaggcatgagccactgcaccggtcctagaatttcttaaaaatccagcccacttcccacattccatcctgcggattaggaaatcatttgaggccagaaaagtgatgtgatttgtccaagggtgaatggcaatggctcaactaaaactaaggtcttcacccagtatatgatgtttttcattctaaccagcacttactacttgctaaaaggaatttcgtaagcttttctttttcttttctttctttctttctttttatttttcagacaaggtcttgctctgttgctcaggctggagtgcaatggcacgatgttgtctcactgtaacctccacttcctgggttcaaacgattctcctgcctcagcctcccaggtagctgggactacgggcatgcactactatgcccggctaatttttgaatttttagtagagatggggtttcgccatgttggtcaagctggtcttgaactcctgacctcaagtgatctgtccacctccacctcctaaagtgctaggattacaggtgtgagccactgcgcccccgctggcgctttgctttttctttacagtcttcctctcattagcatgtttcccaccctgctgagaatgctatccctgactcgtcctcttctattattattctccttttatgccttcctgggagctcggacatcaacaaagttcagcattccagattccttctctacctgctctactctgtgggaaactgggtacttacatgatggatttagttgccaaattatctttctttggaagtaacagccccttttctccctcacggggaattctaagtttgcagcctgaatttgacaaccgggggaaggtctgagagttagagacaagtatctgttctttgtgggtatttattcacttactcaacaagtagctgtatgtgtcccctaagccaggcaatcttcaaagctctgagagtctaatagtgaacaaaacagcccaaatccctaccctcatgaaacttgcatactgatgggtagagacagacatttaaataggtgaaacacattgtgagctggtgggaagcacaaagagaacaccagagcagaaaagagggacaggagtttctgtggtatggtggctgcaattttaaatatgggagtcatagtctttgtaaaagtgacttacgggcaaagacttgaaggaggtggagccttaagcctgccaatgttgtgagggaaatagctcctgaccaaaaacacagcctgtgccatagacctttgtcctcaccagttactaacttactgctttggggggtcaatggcaatggccctgtgagaagctgaccgagtggaggctcctgagtagaggaacctgaccctgccctgggcagaagggtggtgtcttttaaaagattatgcaaagtgggagaaggatgtgcattagtgttggaagacccaccttgctttgtaggcaagaaagcatagttgttctataagtgggcctttcaaaggggggcttactacatttatatgatttgtttggtttttccttcccttagtttgctataattaagcctgctctctccattggtggcatttttcttgattaagtctcctttctaaagagactggttgtgaagaggcagatggtttgagtaggtgctgcgagtgtttgctggcgaagtgcagggcaagttgggtatatttgtaagctcgctgtggatggtagctccagagcctaagcacggtgctgcctcctctgtgcatcactgggtcatgcaatttacctctgtgccttagcttctgtatattggggtagtaatgtcacctaactcataaggttgttagaattaaatgagtttaatacctataaagcatttagagaagttgttggtacatggtaagttttaataaataggtacttagaaagtactcattgaataaaaaagtgatgtttgtgtttatccaggctgtacctttgggagctggcttataatcttgagacttaaaattagaatttatcctagtgatcaaagataaaagtttggaaccttggctgtacatttagctacagggctagaagaactgtttttgtgaaaataatttgcttaccatagtgaagggcaggtcttcttggttactaagttaacatggataagacttttactttgtcctgtagattaaatacatgtaggcccttttgtgcttaaaaagatttgtctgggcagggcgtggtggctcatgcctgtaatcctaggactttgggaggcccaggcaggaggatcacctgagatcaggagttggagaccagcctgactaacatggtgaaaccccatctctactaaaaatacaaaattagctgggcatggtggcccatgcctgtaatcccagctactccagaggctgagacaggagaatggcttgaacctgggaggaggaggttgcagtgagccagtgagccaagatggcgccattgcactccagcctgggcaacaagagcaaaacttcatctcagaaagaaaaaaaaaaaaaatttgcctgtaatgaactccaaagtgcaggttgctcaaaagttacatggaaacttgactgtcatagctggattgattctggaagcctgtgcaggagaggtcggagttccagagaggctgggaccttcagctaggaccccagccaggctgttgggcaggttgcagcgatagtgcagcagagcccagagctggcagccaactactatggtcatggcacctgattggggatgtggtttgcaaataagtgtctgtccttgtccatcaggggagttgggatcaggcagtttgggatttgggtagtggggttttgagcagaggtctgtggttccctgttacatcccctatttgcatgaagaatcttctagaaggaaagctggcctagtacagaggagggtccttggagtggaagcaaatggctcccttctcctctaattgactcagtagaggttggtagaatagaggttaaggggcagggatgcttgtgtggccttggaaaagttagcttcactttcctttctgtgcagtagggatgatgagaactgtctacttcctgacgttgccccaaggattaaaagaatgtaagactctcaaaacaagcttctttgacgtcccatccacagtgcagaaggcccccattacccctgcactgtgcggttggctctcctttgcaccccttaattgaccaaaaagcagcttctgtcaccctgtaaatccttgaccttgaagaagtgggtggctaaaggtgccacagtcaagattcctcagccactcggctactacccttaccctcaattttgcagtttatga

SEQ ID NO: 97353 - DNA, 16214 bp, Homo sapiens
atggaggacagattagctgtgctgggttagactcataggcttatctggaatcctgcactcatctacaacgctgattgagtgaacagcaaacatcgtactgtgggtacaaacttggaggtgtttacttggaaatttatatctaccttccaaataacatcttggaaagcacactggtagatgaggcctcattgatgaattcacttagaaaaacatcatagcattcatttttatatcaatcttcattcagcccaatatttgtagctgaacaaaacactgacaacatgtcagacacgaaggccatggtcagttgcctttcacacaggaaaacaaagattagctgtgtagctacggaaagcgaatgtctgttaagtacagaggttgtagttaacagctttatgtattcaatttgtttgcaattgacaacacctcattaattgtaagcccagtgacactgcttgctgtttcaagtcacttttaaattacacacgtgctacttaatcttaaaagcaaaattaaacattggactggtttacatttcaagctacaatatggaaccattgtatttggaggaatgagtttaatatgcattgtaaaataaaattagggggtactttgcattcacagcggcttatgtaattaggttcagtcaactgtaatgtttcaggttaatgtcttccatgatgtatgctgtgtaaatagtgaacttacatatcccttaatacatctgaattattacataaatccttaatattaatataataaagtattttaagcaaattacttggaagtgtgagttgcatggcaagtaggtaaaactgatttatttttaagagatcagcaaagataaacatttcatttatttaacaactacagatatttatcaagtctctacctggtccaggtacagaggacacaaagatctgaaaactatagttaccgccctcaagaatctgctaactgagtgtgacgtttccagagggttccctggaatacggatccccagttccctgttgggcgtaggcaggacagttgggagccacaggctgcagcgggtgggttctcttgagagtttgtgggtagagttcagaaggcctgcaaatctagacggagaaaacatttgcacttttatttccaagtaattggcttcttttgcaatcctacatatcctctatgcctttaaaacattgtttttaggcctggcgtggtggctcacacctgtaatcttagcactttgggaggctgaggcaggcagatcacttgaggtcgggagttggagaccagcctggccaacatggcaaaaccccatctcttctaaaaatataaaaattaaccagatgtgatggtgtatgcctgtaatcccagctacttgggaggctgaggcaggagaattgcttgaacccgagaggcgaggtgaaggttgcagtgagccgagatcacaccattgcactctagcctggacaacagaggcagattccatctcaaaaaaaaaaaaaaaaaaagaaagaaagaaaacaaaagcattgtttttagattttattttttaaattacatgcttggagtaaaagtcactcattttggcgtacagctccatgaattttaacaaatgcagagttgtataaccagtaacactatcgagacatgcacattttaccaccctgcccccgaaaaaaaaaatctgtcatcatgcacctttatgtcagaccctgtaaccccacccctaccctggtatccactgatctattctctatctttgtaattttgccttttctgaaatgtaatatatgtggaattatttatagccttttgagtctggcttctttcacttagcacacggatttaagaaacatccttgtgtgtatcaatagtccattccattttatggctgagtagcattctgttgtatgcatgtagcgcagtttgtttatccatttcccagttgggggacatttgggttgtcttcagtttgaggcacttaatgaataaaatggctataacatgtgcatgtaggtttttgcataaacctaggttttcatttcacatggataagtagataggatgggattgctggctcacatgttaagtgtgtttaactttataagaaacttcccaactactttctgtcatgggttcaccatttgcttttccaccagcagttgctctgcatctttgccaacatttgctattgccagttatttattttttatttatttatttacttttttttttttttgagatggagtctcactctgttgccaggctggagtgcagtggcgcgatatcggctcactgcaacttcagcctcccggattcaagcgattctcctgcctcagcctcccacgtagctgggattacgagcgcgtgccaccacactcagctaatttttgtatttttaatagggacggggtttcgccatgttggtcaggatggtctcaatctcctgacctcgtgatccacccgcctcggccttccaaagtgctgggattgcaggcatgagccaccgtgcccggcccgccagttgttttttcctttgtaagtttttgccatccttacaggtgagtagtagtatttcatgtcagttttaatttgcatttccctagtgactcacagtgtccagtatcttttcaggcccttatttgtatataaagttgtttatctcctttaatagtatctgttcaaatcttttgcctgtttttaaaattgggttgttaatgctatatattttattgtatgcaattaaaagcattattctgatgatatttccctaaatggcccaaaggattcgtgttccagaaaatattaagaacctttgaaagacacactgactttaaaatgttctttacatttttgccttttctcgtgacacgtctactttgctcaaagtccgcctcaaggcagaagctggcctgtgatagaatatttcccaccccatctttctttctttctgtttttcgtatatgaagagggatttccaaatgccaagtgtgggcattcctatgcccccttcccaggagcagcaagccatttctctattctgatttctgaaactctaccgccccctttgcatcgttacccaaatggaaggaatcctaggttgtggggaaaatgtgaactaacatattccagaaaaatgaccccactccaccttaggaattaggagtttttttcttaatgcaggacaaaaatctgattgtgtattttatcatcatttatcatgcacattttattactgtttatctccacaacaccatgggcttgatatatttttctgccttaatctccatttttttcatcaaagcttcccagtagggactcatctcctagcaaaaatggtttttaactatttgggatatttttaaaagacttttgtggacccttttatatggtcagccaagttttgacttagtcatcactcattctttaagtcaagtttcaataccgtcttcaatggttaacgtttcttggaaccataaagcttatttatgatgaatatattaattttattttgcagttcttctattaaggaatataagaaggaatatagggcacagaaagtggttctgtattatttttatttgaattcaacttatgattgtcctcctcgaatcaaaaagaaaaaaacattgaaaaagcaaattacacgcaaagtctatattgaaaattaacatgccgcgttgaagaactctgccatgtgttaattattgatattgttgctttagaattagctttatcgataaatggatgtcctaaattttatatttggcctattgtggccaaatatatgcaaacttacgttaagtgcttatgttttggggtataggagctataaaaaaagattgttcccttccatatgtgtacagttcttctggggaaatgaagacatacacaggtggaacggtaagaacagtggcgaagaagggctgcacggagtttctctccagccttttgcgcatggcacgcaggctcatcattgcagctgcagttttttactctgctttccctgcagcaacagagacaggagggtggagaagggcgcctgtgctcttttgcagctgtgtgtgctcatgccaccctcccactcaacactccctgctcagattcctcacgcagcagtgacaaagtaccactcactcagtggctcaccgtcagagaagcctgggcctggcctggcccagctggttctctgctcatcgtctcacttgacgaagttgacgggctgcagggtcatgtgcctttccagaggctcaggatgaattcactcccaaactcattcaggtattggcagaatgcagttccttgaggttgtaggactgaggtctcagcttccacacaggctgtgggctgggggaggtcctcagagctagaggctgtcccgatgctttagcgggtggctccttcctccatctttaaagcccgccatgtgctcccagtctctctgaccccctttctccctcatctctctggctctcctgctcctcgtctgcctttaagggctcatgtggtaacacagggtgcacccggatgatccaggataatctccctacttacagtcagccgtttagcaaacataatcccatctgcaaagtcccttcacaacggtacctggattactgtttgatggaaaaaaacaggactggaaatcttgggggacatttttggattctgcctaccaccccctccatacacacataaacagcaaaatgacaaaattcaaggctctcctgagtgactgtttgcagcaaagaaagttgtttccatttcagagacaatatgtgctgagataagtttgtgatatttacacatttggtgtttaatcctcgtggactacattatacatatctttaggaatactctttacataaattaagataattttctctttcctgaaaacataacagcatgccacgcgttctggatgaaaatgaggaactgtttacaccatgggcccaattaaactctgcgagaattctgatgtgcgataaaaatgtgctcagatgtatagcatattttaagtttcctaggactttccttgcaagcataatcacaaattaatattaaaaagctatttaattacaatatcaagaatgtatctaaggctccctggcatttaacagagaaagttatgctaaacatacatcattattttcctccatgcagttgtccagggtgacctctcttagctgggattgacaaatccaccccaggtggcagagtggaagagcttggagtttggagttagaaggtctggattgaattttctctttccaggcccctaccgaagtcctgtggtttccctaaacctcgatttccctaatgggcatgataatcctgatttgagatttaatgaagtcatatcaaagaaaatactttgtaacctataaagcacagatgcttgctaaacaactcctgtaaacatacattatcccccttccccccaccccccgcgcacacacacacacacacacacacacacacacaactggtgattgtaactcactcatctctctttcccacagttgttttgaaaacttctgggtttctgaaatgaaggttctttgcagaggacaatcttggaaaaaaagatgaagtttgatttcccttttttctttgcactataggggtgttcactgaggttgcagagcaccaaccatgtctgcagaggagttcacacctcactggtgttcattgtattgcttcaccgttgagagcctgaatgtgaaccttgttgtattaaggtgatattcttgtccttcatgtgttagaatatctatttgctttgaagagagagtcagactccctgccttttgggacatggctttgagatctgcctttcagtaagtaagacgctatcctcaaattgagctgggctacctctctacatgggaaaacctaagtacttcacagaaagctcggtgacggtttgagtttcccagaatgccgcactcatccccaaggataagtcacgtctttgggggatgatggggcttcgacactggacacgtggacactggaccggaagttagaatccagtctcccagccctcaaccccatgctcctttccatggcgaaggaggagaagctcgccgccaccccactggcctgctctgctgaggttgtggagcaccgggaagcaggggccgagccttccccgctctgtgcctgggggctctgggcactgtctacacctgggaggtggtcagcatatgtgcgtgggaacttgctggaaggaaggaatgacccttctagccatggaacggtggtcatccgtgagccacggcctcaggaggtgggttcccttaaggctccrgctctgggggcagcgycccctgggagcstccatttttaagcctgtgaagaaaggrctgctgacgtttggggcccccgctatgagcatagcctccactcctccccaatccctgtccgtgcctctacatacctctgtggcatttgcaaacccttttcttagcaggtgctcccatctgtgtttgcccttctctcctcccgtttccatggagaggctggcaccaggacgcgtgactgacagtgctgtctcccccagcagtcccctctgagtctgtcgggtgtgggctccgggctccaccctgcttcttccttagcccgctctctgcccctcccactgcccaggctgccggggcttccagctcccgtggtgcaaacgtggcctttgctggcggcaggatgcggttgcgtcaggagtaagcagagcttttgtgaccaaaatcaaccccggggcatctcaggctctagcgctggtgggcgtgtgagatcatttcagcccaacccacatcccaggcttgaatcccattaccaggggcaaccgatccttcttgtcctttcccagattggtgatggatgtccactgtgtctccatgcagctggccactctgtggacagctgtttgtgactcagctcctcccagcctgagggcatctgggccctgcaactccatcctttgctcccctttcttcccgcggggaccctttcatctccctggcaggaccctgtctccacccgagggcacrttctctgacctcttctgcggagtaccctggcttgatgacgcttcctgttccttcccagggttgtgctgggggcatcagtctttgaacagtccctccctgagggctgccgtgtcccctcagtgcccaggcacatcaagcactgctacaaacccagacattcacagggacccctccacctgaagtccaccataaggtagaagcttccggaaggggtgatgcaaaggggtcaaacattyagactacgcctcagagctgcatgattccttcctctaactgtgaagcaaatacagcgatttctctgggtctgccatcgaggccttcttccctctgctctcacctcaggtgccttcctaatgtgcaggtgacgattgcctctgagctcaggcatgcagcttctgggatgcactctcctttcacggcaaagcattctgcataggaaaaaccgtctctgcgtctccaagctgtggcctagcccttcattcatcaaatgggatacaactttcatttcttattaaaatctggaagtcactctccatttgtaagatatcccaggggttgatgtcatcttgtaaagggggacagtgccattttctatcttacactttaaaaagacaaaaccactagctacaaacatcattcaccacagcatgggagaggcaaccccacagcaaaggttatgtcatgtttcataaatgggtatggatttgggggctggtttttttaataaaaacatattttggtactttggaacttgacataatttgagctgtttatgttgtagatgttatgaatagatgttatggtattaattaatagtgtgtattttctatgtctgggcttgcctggaccgctggtccttgcctttctttctgacacagaatttccagggcctcaacctgcttctgtctggaagtgacagcccactccacaggggtcttcagataggggtagaaggtggtgccctgggctctcctggctctagagaatctggctctagaatcacgaagccttccagcatccccagcttcccccttgcagtaatcccataagggaagcgttgtcccattttacagagagtccgtggggctgagaggtgtcatgaattattctaatggtagtaactctattggagaggctgaaacccggggctcgtggatgttgtgacccaccccccaccagaacctcccatcctgactcactgaatatttagtaccatcgtcccctggaggatggtctagttggcaagtagctgaggatttttaattctaatttagtttaaacatggctgtttgttgctgttgctctctaaagggccttattaaagactcttgctgcagtgaaggtggcctgtctaggaatcgatatggatgttgagatctgagactctacaacacccccaatctcagtccttctcgctccataggcagttccattccctgcagatctaactctgagattctcactcctgaaaatgcctggacaataaataaatccaaggtgaaggtgttgatgccagtgacctagctgcatcattttattcatggcatcaagccttcaagaatgtggcttaacttgtatttattcacatgataatggctttttataaatctgcatctcttcctcccctaggaagaaaaaaagggcatctcttcatgagtcacttgattaaaattcctctccagtactctgtaccatccactcatactggaattgttgaaaatcaggtgatttgcaactccacacttgcccaaattaaaccatgagtggaattgacaatatgaatcctgaattttctgagctggaaggaggttctagtgattacccacaccagggatggcattttacacatgaagaaacagaggccccagggttgtttctgatccaggtaggatcaatatctcggtagagaaaagggggaatttttttgcttatactttttaaaataagctacttgtggctgggcgtggtggctcatgcctgtaatcccagcactttgggaggtcaaggcaggcagatcacttgaggtcaggagtttgagaccagcctggccaacatggtgaaaccccatctctactaaaaatacaaaaattagatgggcgtggtggcacatgcctgtaattacagctacttgggaggctgaggtggaaggatcgcttgaacccaggaggctgaggttgcagtgagctgagatcacaccactgccctcaagcctgggaggcaaagcgagactctgtcttaaaaaaataaaagtaaaataagctactcgtaaggggtgtgtgtgtgtgtgtgtacatgcatgtgtgtaatctctgtggcgtgtgacctggatatattcataaaggtgtaagaataattcaagtaggtaacgctctctcacattttttaaaaaaagaaagaaggaaaatatttattccttatatttcaggatggcagtcaattagggtgtgatgtgacttaaaggtcacaggagaccttgcctcttgccaagtgctgccacgactgtgtggaaaatctcttgtgtactggggacccagtttctttcctgtgaagggagttgacagaaataaaaaagatcactgaatgagataatcrttgtaaaggagccagcatagcagccccttaattagggggagtgtgctgtgtcactgaaacactctttgtttccaatcagggagctctcactgatcagtcaggactctaattgttggatagagtcaacaattagaaaaaaagttatagtctcctaggagacatagacaagtgagctgacagggtgggctcagctcaccctgtcccagcaccttgggaggagtgtcaaggcaaacgacaggcagctgggtgcagtggtgtgagcctgtgattcctgctacttaggaggctgaggtgggaggatcgcttgagcctgtgagtacaaggctagcttgggcaattttggggagacagaataaacaaaaattgactttttttaaaaaataagtttgtattttcttcaattcaaaacatttttagaattgatattactttttatagctttaaggcatatttcacatcgatattacttcttaatatatatatttttttgctacagatttggagtgtgtaaattgataaaattagtatcaatgctattgtaactacctggaattggttaaatagcagcagtgccagtcacctttcttagagtagagattgccagcaggcaatatcttcatcctcaggacccaggtctctcttctctgaccctgcctggaccctgacaatcccagggcgctctgcgttggaatcagtttggatgtgtgttaccagatcttcgctgaagcagggcactctgcattggagtaaatttggatgtgtgttaccagatcttcgctgaagaacgcaaggaacccagcatgcaaagctggccactacagttacatttttccctccctttgaaaaaaattttatgaatgcctttctgaacaaagaatatgaactaaccctcatcattcattacatttaaatagcataacatgccattgaaatccttttccagacgtttcagcaagtgaaatcatttgtggttcatgttatagctttttcagtaacatgacttgagaaatttttcttcttactaataaaagggaatcattcccgcagttaaagaattcatcttggaatcctctggtttttcatcatgctttacttttaaaacttcccgttctgctgtagcaaacttcccattctgctgtggcaaacacgagtgcatattagttttcatctttggaagatgaatgaagtatgtgacttttcaaacagggatctcacattttaagtctagttattccagaataaaaacaagccagaggcccaaacacaggattcttcactgtcgttagcaatttgggcacaaatctgaagggccagtttggtgcaggtgtgctggaggatacatggagaaaaaaaaacatgttccagtctagttctgatacacagaaattgaaagagcaacccaaggagttgggttgctcttccacatggtcaggatgagccaaggcttccgggtagggcttttagggcaagtgggccccagctgagcccagcaggggcagggccaagatgagcagaaggaagagataggctctggaaggagaggcaggaggaggcaggtgtgggcaggtgcaggcagatgtgggcaggtggaggcaggaggagacaggaagaagcaggtgagggcaggtgcaggcagatgtgggcaggtggaggcaggaggagacaggaggaagcaggtgagggcagatgcaggcagatgtaggcaggtggaggcaggaggagacaggaggaggcaggtgagggcaggcgcaggcagatgtgggcgggtggaggcaggaatagacaggaagaggcaggtgcaggcaggtacagacagatgtgggcagatggaggcaggtagaggcaggaggaggcaagatgaggtaagaggagccaggtgcgggcaggtgcaggcagatgtgagcaggtggaggcaggagacaggaagaggcaagaggatgccagctgcctgaggtggctgacagcttcacccagctgaggttcttgcccatcctatacacccatcccaggacctctctctaaacactctgctctgactttggcatttccttgaataaacaccccagaagctcctcgtctccttcatacaataatccagtctgcctagcccagtgaatgagggttctaccagagcccagccaacccctaggacagctcacatcccaccatccctgaggtactgcaggctcacagccttcctgatggaccacacctgtgcaccgggctggtcccctgcatgcacctctcattcaagttgccttcctctgggaagcccccagggacttcttttctgtcctgcactggcagagtccccctgcttcccctgcacccagcacattccttccttcatcaggtgttgctgcacctctgctgctgggcaggcttggtgccaggcactgaacacacagctgagtcccagatggatgtcttagtgtcaggagacagagtaaagttctaggcctattgtccatcgtttcttgagacagggtcttgctctgttgcccaagctagccttgaactcacaggctcaagctatcctcccacctcagcctcccgagtagtagggattacaggcttacaccattgcacccagctgcctgttgtctgccttgacattcgtcccaaggtgctgtgacccagttcatttgtctgtgtcccctaggagactatgactttcctgcaggcagggttgtaccttctcatctgcaccctcagtgcactcaggcaggtagtgtccagaaaatgcttgaagacaagaaaggttcccccagtgagtccatgcagagcagaacggcaagcagggcaggaggcaccaagctggcagggcagggtcttgtcccagatgtactgtgtcctggagaatgatgtgctaaccacatgcaggccgcctgggatggagaagagcagtggagtgagtcttccctgcctggtgggaggtggaggccctgtggcatctgaggtcaaggtcactgccactgggctggcagggctatttctccaaatgttagaatcaagaacttcagattaaacttcccctctgcctactccttccccatgtcagcattgctgaacagctgccatttagcaattgtgggagcaacacctatttattgagggtccattctgttctgggccctgacacagtagccccaggaggtgtcacaaatgcaagagtcaggcaggtgtcatcatacatgagccaggggagccaggtgggcctgagccgaggggagcaacacctatcccggccacaggggtgccctgctcaggctcagcccgctgtgggctcacaggagcacatcttctgatttttcaagagaagctgagcacctagatttttgtgtgaaatgctacaatttaaaaatataaacaatgaatgtaaacaaatcttacaccaggtaggctaaataggagccatttcctagccgcacttggtttctggacagccagttttccaccttgattgataaaagaaataaccattcttggttttttatttacttccagatctccattcccctgctctttctacaatacaactcccaccccgtccatctcactaaagctcccactgatgctcctgaagccttgatctgtacatccaggcttccttggtttgtggccacaaaccccgaatccctcactctgatttgcagagtaggggacaggtgagggctgggcccagggcagagccaccagtgagaagttgggcaacccttgatctcatcagtgtggcccagactgtgtcactggtaagggaaaaggcaaagaaaacaggcaaaatattgatgtttatctgcagagctgaatgtctttttatctcatagaaaaaaaaaataggtcagcctcccctgaaatgcagggcaagcctcctatagtccagtcaagagcatttcgagtgtcacttgccatggaaggaagctggagaccacgatgtcagagaaatgagaatgagagaaacagaaggagagctgtgatatccaggaagatggtttaagcacagggaaccaaggaatctgtctccatctgctagcaaactgaggctctaatcactatcagaaacggaagaatgttgaggaaaggtgatcagaggtttgggtgctgttcatcaacctgtctaaaatgaaatttttaaagtatgtttttctttaaattgtacgacatcctcgatttataaagcaaatcaactaacaaagctatgcctttgtgggcactcaacttgatcctttgtctttaggttaaaaaccaaatcctacaaaatgtccatcaagggatgaatgaataaccaaaatgtggtcatacatgcaatggaatgctgttccgtcctaaaaaggaaggagctcctctcatttgctgcaacacggatgaacctggaagacgtactgagtggaataagccagttacacacagacaaatactgtatgattccactcacatgaggtccctagagtagtcaaatttgtagagacagaaagttgaatggtgggtgtcaggggctggagagagagggatggagggttatgtttaagagggacagagtttcagtttgggaagaggaagaagtactggggcgaggtagtgatgatggttgcacagcagtgtaaatgcacgtaatgcccctgaactgtacactcaaaaagggttgaaatgttcaatttcattttacacgtacattaccacaatttaaaaaactcatacaagagcaggaatttcagggccgcatctgttatcataaaaccatggcactgttgagactcggaagcaattttaatcacgtgggccaggaaaccggtgactttcttatctctttgatctcatggaaacaccaacactgttttcatgtgttttattcttctcttcccagctctgccagacatccacacatcctgtctaatgaaaacagtaagactgtttaaactccagaggtcatgtaaggaaatcattcctaaatgtgtagttcagagtaaaaagtgctcttgtcgatagcaacttttcataaatttgtttttctgagcgtcacagtggtatttgttcatctctaaaaatctggattgtttcaagatgatttttaaaattatttataaggaacccccaaacttgcctggctgccagtctctcacactccctgtaaccctcgagttgaggagtaggttgctaatcctctcctagagtgtctctgccaccagcctggaaggcactggggctccatgagttcctgcagctctttgtctgtgcatgcgagaactttcccgtcgtcttctcccatgcaggagggagacggctacctgagcctctgagtctaggttgaaggaaggtcggtgaagaccccacccacagtgagacaatgcggtggtcatggggaagctccacccaccaacaccccaagccccagaagttctgctgcctggaatgcgcaggaggcttccagggcagctgaggtgactctgatttcatttgctcaggcagatggtattggagagactcagccactttattctgcagttggtcagcacttcccaaggggattttattggtcttctccaaactctcttaattccagaccttcccagcctcacatttgctagtctcagaacagagctaaggaggcctgttcctcacgagctggacaggcagactggaatgaccgtgcccactgctggggtggcagtattgggcatggtgtatgagtgtgtgtgggttgacctggctgtggactctgggtggaaggaggaggaagtagttcctatgggcattggggctgggaagtctaattagaagcaatagtgttggcccaacaagtggggcatttgtgcacgacagaacctaagggcacacaaagttgctcctgtcagggatgtgagtcagccaatggccaagctttgactttcggccagggtggagagtggcagcaaatcatggttctgctgctggaaggactgaagtccagggaatattactgctcagagggcctgataagaatccagggaccagaactggggtataaagtaggactgagaattaagaggaagaccacagctgttgtgtcacatgcagcatgatagtcagggatggatgagcacctctgggaggtacttgataaatattgattgaatggctaaatggtgggtgggtggatggatggatggacgatggacagatggatggatatgtggatggatggatggatggatggatggatgcatgcatggataagtggatggatggatggacagatggatggatacatggacagacggatggatggatggatggatggatggatggataagtggatggatggatgggtggatggatggataaatggatggatggataagtggatggatggatgggtggatagatggatggataggttagtgaggttagaaaagtaggcagaaactggatcatgaaggccctataaggattttgcacataatagaaggtcatttgaggagattgagcaggagagtgacaaatggaactgtgtatttgaaagatctctgtggctccacgtggatagcaggctggtgtaggtacaagactggaagcaagagactagctagggggttgttgcagtga

SEQ ID NO: 97354 - DNA, 201755 bp, Homo sapiens
  misc_feature (1)...(201755): n = A,T,C or G
atgatattatacctaagtatatatatgcatgtaaccaacacctctatcaatatattggtctatgactgacctccaattaattgtaaagatatagagtgttaaggttcatgtttttcacatagctctcaattcctcctgtaccatttattgtaaagagcataatttccaccaatgaatcgcagaggtgcatttattgcaaataaagtgaatatatatgtgtaggtctgtttctgggctttttctttcattacgactgtctatacttaagtccagaccacagttttaattattctggctttatagtgactcttgagaacttgtgtataagtcttccaactttgtacttctttgtttaaaaactatcttggctctcctagattttttgaatttccatataaattttagaatcatcttggcaatttacatacacacacaccccccaaacccacacacacatacaatatctaaaattgttgagatttccaactcatgaacataatatatctctctactgaggtcttctttgatttcttttagcaatgtttgtagtgtacaggttttacacatcttttgttagttttatttctacgcagttgatatatttttatgccattttaaatgacatttgaagatcttcattttctaaatatttgcagttggtatataggaacataactaatttttgtatattgacttttgttcatttgtttgtcttaagacagggccttgctctgtcaccataggctggagtgcagtggcacctgggatcaagcatttctcccacctcagtctcccacatagctgggactacaagcaggcatcaccacacttggctaatttttaaaattaatttttgtagagaaggagtctctctggtctcactgacccaggctggtcttgaactcctggattcaagcaatcctcccacctcagcctcccaaagtgctgggattacaggtgtgagccaccacacctggccttgtatgttgactttacatctagcatccttcataaattcacacattcattttaataatgaatttgtagattcccttggattttttaaatatatgcaatcacataaagttactactttctttccactttttatactttttttctttattgaattatctaggactttcactgtaatattgaatagaaattgtaagaggagacggccttgccatgttcccaaactcaggtggaaagaatttcatgcttcactatttgaaatgatgtttgctataggcttttgtagtcattcttcactagattaagagagtccattttatttctagtttgctaaaagttttgaatcatgaattggtgttgaatatatcagatattttttctgcatctatcaaggtaatcaaaacgtttttctgttttccattaatgagattttcaaatgttaaaccaaccttttttatttttggaataaactccttttggtcttaatgtattatctttttgatgtatcactagattctatttgctaatattttatttagaacttttcatctgtgttcatgagtgatatgtagttttctttccttgaaatgtctttatcagctggtctacaattagcttaggtggcttgggtgactcctatctgctcaactcatcttcatcctctgtcaggatgaatatgatggatatgtttcaaggtaatggcaaaaggaaagagctagagtggaatcttacaaatgcttttgcaagcctctcctttgtggcatcccggtgaccaaatcaactcacataatggaacacaaaattagagtgaaagggcactacgaggtgaaatgtgagggcttggatttaggaataggtgaagaattgagaccattgatggaatcattctaccgtatcctcaggcagtgaagcattttcatccatgcagatagttcacaagaaataactactatatagtcagagactcaagacttcagcaattgtataaaaatacatttgtaaatacctaaagaccttgaggagaagggtctgaaccacatctcacccaggttatgctattcacggctaagacatgactctaccactcccttggccaattttgaaaattatttcaaactatttgaggtggaagtactttctgtcactccgaatgggcacagtcatggagtaatgtgaccagggtccactggatgggtcatggcactgagggcagccatcccaaaatttccaaattccatctttttggggaaaacacctcttgattgctaatattgttttttaaagcaggttaagctaataactgtgagttaattatactacatctagattgagccaattttctttcagtagatttggtggtgactaatataaacttggcaacacttaatattagctggggtgtttttaaaaagccaaaaacttttagcatgtaaatcaaaacaaagacattactatttttttctggggtgatctctagactcttggtttctatcagttattaaactgttatctcaactgttatctccttggggcattgacaaagtactaataagtcattgattcctttaccatttttaatcagagtatcccaaaaggaggtaatcatgtgttttaataaattccacaaatcataaaccacccaaaaagcaaatctaccatccatattaatatttagtctttcatctttgccagagtgcagccccaaatctaagctactagttcagctacctgggcaggctgggaatcgggccatggagcccttcagcgattgcatgttcagtgataacaacatgtcctgcactgggagtgtctctgtcatatttgagagccatctacaaagtatattaaatcaaggttgactaaaagggagaagattgaaatccaggcatacttaagtcctgagaggatgctaaacagtcatgtgattcccctttattcttaaaagggaatcaagttgcagggttacattttgaacagcagcgaatacgcaaagcagacattacaatttcataagtggtaaatttgctagtggagaagtgtcagatgctgccttgaagtagcaaaaactgtagagatgcaggacccatagagttagtggagaaacaagcactacggtggaagcatcaacaagtttggccactgctaccacctcatgcaagtacggaaggtatacctttgcctccaaatcaaggaatgtgctaagataggcagagagaagagtatggtagatttaggaaaacccgaaggtggaggttgttgcaagaaggcttgggattacaggtgcgagccaccagacctggccttgtagagcagacagcattttctacttttgcatcacaaggaagagtttcagaaattataaactttgtaagcccatgcaaaggctgaactattgagaaaaatcagatatacaattacctacattcctagaatctccttagccatcttttaatttctgttcttgatagaattgaatgcactttattctagctgaaaacagacactgtccatttggtgagagattgtgaccagaaaaatttagattcttggcagagttgaaattttttctagattctttatgtcccttttcacctaatttggataagaggtatttggagtcttcagtaaactacttagatcagaaaacacagcagaaaatcatctaaatattgagttgatatatatatgattgtaaaaaattatatatatatatgtatatatatatatatatatatatatatatatatatatatatatatatacacatatccttttttagacattgagagaactatgaggggattcaaaaaaatccctaaagcttaaccatccaggtatatttgttttcccacaaaaaagcgaatattgactgtttttatatatgtatactaagcaaggctgcacataaattaccactgagagatatttacttgttgagagaatgaaggacaggggtgggcatggtggctcacacctgtaatcccagcactttgggaggccaaggagggtggatcacctgaggtcaggagttcaaaaccagcctggccaacatggtgaaaccccatctctactaaaaatacaaaaaattagccaggcgtggtggtgggcacctgtaatcccagctactcaggaggctgaggcaggagaattgcttgaacctgggaggcagaggttgcagtgagctgatatcgcaccattgcactccagcctgggcaacaagagtgaaactccatctcaaaataaaataaaataaaataaaataaaataaaataaaataaaataaaataaaataaagtaaaataaaatgaaggacagaacagtattctaatggttgcatgatatttaattagtgctatgattaacctctaatgttggacatgtaagtgtcagtataatcagtaatacagcaacagacatctttgagcataaggctttttaactgtaatagattgctagaagtgaaattacctagttaaagagtatgaatatttttagtgttcttaatatatattgccaaatccaagagcaactgtattcttgtatcaacaataaatcaaagttttaaatttcatgccttattttgccgacattggattttctcattaaaagagaaagggctaatttcatgggtgcaaatggcacgttattgttgttttgaattcgttattggtgacactgaatatttatctgtgtaggttgttgatcagttagattttctcttttacggattgtttatgtccttggcccatttatctataaggtgagtgagtaatatttaagttgttgttaatgaattattaatttatcatactcggcatagtccccatttagtcaatttttctgaaaaatcgtttcccctgttattcattatagcattttaaagcagaaatttcagatttttatgaagtcagacctaagcctattgatcttccattgattcaacacttttagttcttcctcagccaaagaattgattaaaatttgcttaaatttctcatagatatttatagtttttatatgtgatttctaagcccgtatggattttatgtaagaaattccatgaattctgaagtatataaaactgtttatccttgcctcccccactatgcagattcagagtgttcatctttttgacttattatttcttcctaacagagatagccagtttaataaatggatgattttgatatgttcattttatttttctcaatattaagccggtaaacattgctctgagggtaccatactaatcagttttaaaatttcgtgtcatttttgttgttgcacagacatatatacatatgtgtgtgtatgtttcagaaagatgtatttactgaaagttggattcatatagtggtattaactgtattttaaataataaatactatttgtttttcattttaagggttatacgtacatatatatatatatacacacacacttataggtacatgtatatcttcatttaaaaaaataagagaaccgatgagccaaaaaagtctccatattgttaccagttatttaaaatttgttatgtttatctttttctatcacgcatacacacaatcatactatatactttttgcatttatttgtttacatagtgcttacgtagactgtaatatgcagatcactctctaaagttgtatccattcaaaattaaatttaaataagaaccaatatgaattagatttaaacaagaaccacattaactgtgaattaatgatttagaacaaatttacttaaagttagttaaccagctaatttacttatgtgatagttttaaacagtgtgtatttacaatagagactcaactgtgtagccaaacacacattgtggactatttgaaaaatcacagtggattagaacttgaaatttgcataccctgttattccccgaatctcccctagaagatgctagtgagagacaaattaatgaaagtaataaccattttaggttccccctaggaaatagcttgtgttggtgtcatgtaaataggtaagatatgtgtttttcttttttaggaagttgtgcactttctagacgagaagcatccaaaccactatcaagtctacaatctatgcagtgtgtacgttactctatattttgctactgtagatagaaaacagattactgcatgtaagaagatgattttgttttttagattgcatttaatcataagtatttggtggtggcaaggaatgaatttaaaaatccctatcttggactggccccgtttactagaaagagttagcccagcagcacaaagtaccgtatgaaggatgtggctttggcagtaccagtgatgctggggtggaagcaaaccattttagggaagatctgttctacccatattaggtttaggaaaatctttctgtttttcctgccagattgtgttatgaggacatagacaatttaacaaatgagtcttctgacccatcagcagtggcatgtgatgagagcagggctctagatgggaaaaaggcaaaaaactctgtagaaaataggttgttacccagcttaatactctgtctctcttgatttttacctctacctgtatactcagtagacattttcagggggcaatgattttggtcagctacatttgcctcttgtgtggtttctaactaccctgcaataatataatgaatagtctgctagaaagttaaaaattatacctattaaacaaaaataagttgaggttagattacatgagatggataaaccactaccatctttatgtttttgagaccttgcatttactttagagagcaggagcaacttggaaagctctttttgaagatagatgaggaattctaataagatatgttaacttattcgtaacttcatcatttatcatgttattccctgtagagataggacatacatattatttattttaggtgaaagagcttatgatcctaagcacttccataatagcgttggtagactcatgattgatgatcataatgtccccactctacagtaagttttatgctaagctggctatcagaagagggctaaatatattgggcttgattttttgaagatattttaactaaaaatcttaaacttgaaatcagtgagatggtggttttcaccaaggaagtaaatkagtggatggctcaagatcttgaaaacatcgtagcgattcactgtaaaggaggcaaaggtaataacattttccttttcatttctccctttctaaatacatgtaaatataaagtamaagaacaagatacrtattgctattaatacgtattaataactgttatcattttaaaatattagctccaaggtggaaagaagggaaggagaaaggaaagaggagaggaggaagggtgggagatagggagaggataaggaagggaagaaagtaggaaaaaagaactaaggaaggttgagcatattttcccttgttttcctagtatttggctttctttatttttggtttgccagtttatatctctcaaaatacaaacagtctttaattttagaatgtcagagtacttttattttatttaaggctgattttttattttaaaattaacacataaaaatatatttatggtgtacaatatgatgttttgatatacataaacactgtgaaatggctatatcaagctaattaacgtatgcattactccacatacttttttgtggttagaacatttaaaatctactgtctcagcaattttcaagtatacattaactatggtcactatgttgtacaataaatttcctgaacttattcttcctgtctaactgaaattttgcatcctttaaccaacatctcagcctgagcgcagtggctcacacctgtaatcccagcactttgggaggcagaggcaggtggatcacctgaggtcagtagtttgagaccagcctggccagcatggtgaggtcctatctctactaaaaatacaaaaaattagccgggtgtggtggcatgcacctgttatcccagctactcaggaggctgaggcagaggaatcgcttgaacctgggaggcagaggttgcagtgagccgagatcgcaccattgcactccagcctgagcaacaagaacaaaactccatctaaaaaaataataaagtaaaaaccaacatctccacagtccccccagcccccggtaaccaccattctactctctgcttctatgaatatgattttttaaaattccacaaataagtgagwcatgcagtatttktctttctatgcctggcttatttcacttagcataatrttctccaggttcatccatattatcwygtgacaggatatcctctaaggctgaattgtatgcctttatttatagatagcacatattctttatccattcatccactgatgacatttagattgactccatagcttgggtattatgaataatgctgcagtgaacacgggagtgcagwtttcatttcctttggatatatacccagaagtggactctccaaatcatatggtagttctatttttggttttttgaggaatctcagtgctgttttccacaataactactaatttacattcacrccaacagtgtacaagggggatcccttttctcttcatcctcaccaactcttctcttgtctttttgttagtgaccatcctaacaggtgtgaggatatctctttgtggttttaatttgcttttccctgatgattaacgaagtttagcattttctcatatacctcttggccatttgtatgtcttctgttgggaaatatcttttcaggttcttggcccattttccagagaagtaacttgttctcttgctattgtgttgtttgatttcctttttaaaaataatctattaacctattgttgaatgtatgctttgkagatattttctcccattctgtaggttgtctcctcactctataaatgtttcctttgctgtgyaaaagtgttttagtttgataaagtatcatttgtctgctttttcttttgttgcctatgcttttcagtcatatccaaaaataccttggcccagaccaatgtcaagaagattttcacctatgttttcttctagtagttttcctatttcagctttcacagttaagcgtttactttgagtagacttttgtatattgggtgagataggttgcaatttcattcttccgcaagtggatattcagtttccccagtactgtttattgaagagactgtcctttccccatcttggattcttggcacctttgtactcagctgagtataaatgcatggacttattctgggctttctattctgttccattggtctagatgtctgtttttgttccagtaatatttaaggttgttcttaaactttgtgagaaccttttagattaagtgagccaacagagatgctatttcaaaaattatactggaatttttgtagtgtaatgatacaaagaagttgacattggtggggttaaaatggggraaaaagccattgtaaatccaaccaatttaagttcaattaggttttctctcattcaggtttaggctttaaataatcatctaagcatatttcacaaattttgacaaacacaaataattacatttttagtgggctctaaatcaatttttatatcaaattccaggaaaacatagcactgtaaactgacttacataattcagtaaaatcaagttttagtcttattgactagtttcaagtccattagttaatacacaggttctgtgtttagctgtatattagttaatatacaggttctgtgtttagctctacaggttggaatattgtgtataaactggcaatttacaataccatagttaaattaagaatatagaggttgaatcmtttgaaattgccagtttttaaccatcttttgctttaaaaatggccatttcacattgcccaacctaaaatgttattattmaagaagttagcatcagttttctattaactaatgctaattccttgcttgaaggaaaacattcatttcaaatttgayttttttcttttttgctgagagggggtttacattattctgtgttcacataatattttgatgattttgttaaaggttgtttagagggctaatattcagctggtatgtaccagagcagcctcttttttatgtgttcattcatattagtcttgctgtcttctggttggttgctgcctgcaggttatcatgatggtaaaaatattttatattgatttataggagttctttaaagaatctgaatgtcaatttttcttagtattgcaattatattctccccacatgttgccttttaaatttgattgtgatttattttgttgtacaaaagtttgtaaatttttgttttgttttgagacatgatctcgctctgtcactcaggctggagtgcagtggcacgatctcggctcattgcagcctgaacctcccagggctcaagcgatcctcccatctcagcccctctgagtaagtgggactacaggcgagcgtcaccatgcctggctaatttttgtattttttatagagacagggtctcactgtgtttcccagactggtctcgaactcctggactcaagtactcaagtgatccamcaacctcggcttcccaaagtgctgggattacaggcatgagccttcatgtctggagagaagtttgtaattttgaatgtagtaaaatttgttcatctatgtgtgtgtatgtatttcatgcttttctgtcatgtttatgaaattcacccttatactgatgtagtaaagatattccacatttcttaaaaaatattcaagttccatttttagtatttgggtctttaatctaaytggaagttgggggggaagtattttttttcatatggatagccaattgtcctaacaccatcaattgcatgctaatttgttctccattaatttgtagtccctctcagtaatataccaagttcctataaatattcaaaactgtttctaagttctctctaccacacttttgtaattattgtagctttataatatagtttgataaaggcagaattgtcttgctcttcttggaactttattatgacattcaattttaaaatcattttgtgaagtgccataataaaacacttgtaggatttttattggaactacattgaatttatagattaacttgagagaactgacaactttgcgatattgagttgtacatgtgaaccatcttgttcattctttaataatattttatacttttttatcatgtctttgcacatcttttcaaaaattcattcctacacaaattgtgactgaaaatggaatctctttttttctattacatttgagttgtttccaatttttactgtgagaaataatgctgctttttttttttttttgagataaagtgtccctttgtcacccaggctggagtgcagtggcaccatctcagttcattgcaacctctgcctcctgggttcaagcaattctcatgcctgagcctcctgagtagctgggattacaggcgtccaccaccacacccagctaattttgtatttttagtagagatgaggttttgccatgtagtccaggctggtctcgaactcctgacctcaagtgatgcgcctgcctctgcctcccatagtgctgggattacaggcatgagccacccggcgcagcccaataatactgcttttaaaaatacacgtttcttgttgcacctgtggccacatttttgttgagtgtatacctcagactaaaattgttctgtcttagggtaatgaatcttgaactttacttgataatgtcacctgttttctaaaacagttgtaccaatttttactccactggtattgtacacttcaagcattccatatcttccccaatatttgcagttctgagtatttttatttttagcctttgggtgtttgtgtgatggcatcttatggtggtgatcatttgcatttctataattacgaataagattgaggaagttttcttaakattatyaagtatttggatatcctttatgtaaagtaactttttaattttcttaaccatttttctcctggattattcatcttttttctcctgattgtaggagttctttatgtattctgatttcarttttgttattggtcataaatgtatttcaagaaagcttttctgctctgtgatttgccttttctctctctcaggagtatcttctggttaacagaagttcttagttgtcttaccatcataggtatcatgctttccctttataaagtttgtrtttttgtgwyctgattaagacaattctccttgagtttaaaggacattttactactatattttcttctagaaggttcattccttttaaaattgatttatgtgtgcgatgtgaggaaggcatcaggtttcatctttttccatgtatggctatccagtcattccagcacactggttgagaagattttcatttctttactaccctgaagaacatgaatctgtttctgacctttctattctgttcattgatttttcatctttgtgccaatagcacaactattttactgttgctttctaatacgtcctcatttccagtcatgtgagtataatcatctttttctttttcttcacaattgtttgggtgttttaggtcacytacttttccatataaatttggaaatcaactagtcaaattacacacaccggatagaaatttgtttggaattgcattgaatttatagactggggagaattgaatctttacaacattractcatcccacccatgaacagaggtattctctcatttagttaggtcctcttcagtttctctttacaatgctttctcgttttctgtatagaaagcttgcatatttttggtgagatttattcctagatatttgatattttatggttatttaaatgatatccctttaaaaatattttctaaatgttttttgttgttttaaatacagctcattttatttattaatcttgcaattagcaactttcctaaactcatttttttttttttgaggtagggtctctttctgtcacccaggctggagtgcagtggcatgatcacagctcactacagcctcaacctccctgggctcaggtgatcctcctatatcagcctcttgagtagctaggactgcaggcaggtgccaccatgcccaggtgattttttttatttttttgtacagattgggtttcgctatgttgcccaggttggtctcaaactcctgggctcaagtgatmtgccagcctcagcctctgcctcccaaagtgctaggactgcaggcctgagccaccatgcccagcctaaactcacttattagttctactaatttatctatagattcttttggattttatggtacatgattacatcatataaaaatagtaaattgtattttttccatttcagtcatttctctcccctagcactggctagaaccttcagtacagtgtagaattagaagtggcaatagcagccatcaacatatagttccattctccagggaaaggctttcaacatctccccaattgctttacgagtgtgtgtgtgtgtgtgtgtgtgtgtgtgtgtgtgtgagctaccatttatcagattaagaaatttcttggctgggcaccatggcttacacctgtaatcccagtactttcagaggcccaggatgggcagatcacttgaggccaggagttcgagaccagcctgggcaacatggtgaaaccctgtctctactaaaaaatacaaaaatttgccaggtgtggtggcacatgcctgtaatcccagctactccagctgaggcatgagattcacttgaacccaggaggcagaggttgcagtgagccaagattgcacagtgctctccagcgtggatgacagagtgaaactctgtctcaaaaaacaaaacaaacaaaaagaaaaaagaaattagtttgctaagagtttttttttttttaaatcatgagtggatgttgaatttttaaagatttttctgaatctttgagatgatgtggttaattacattgattaagtggtaaaccaacatattcctggaataaatgtaatttagttgtgctttattattttgttaaataattattaaataattttattattaaattgccagattctgtttgttaatattttgtttaggattttcaaattcatgtcatctgggagagtggttataattttcctttctcacagttttttcaaattttggcttcataaaatgagttacatttcattttctctatttttcttctctgggtaaatttatgcatgctgatttttttccttcttaagtgtaaagtgaaattcaccagtgaacgcacattggcctagagttttctctggagagaagtctttaaattatggctcaattccatatatagaatgtttttataattttatttcttttgccaattttggtagattatagttttcccagcatttgtccatttaatctaactttgcaaatgtcttgacatcaaattgttcacaatatcattttaccattttaatgtctacagaggtgttcccttttttattcctgacattgctttcttggtgccttctccccttttttcttttgattagtctcaccagggatttatcaattttactagtcttttaaaagtaccaaatttttggccttattggtggtctctattttttatttcatcaattactatgatatttagtattttcttctgtagtccttgggttaatttgttcttttcctgacttcttgacatggataattcttagagtgtcaaccactctcttttctatttaccatttaaggctacaagttttcctctaagaattgctttagcttcattccataaatttttatttgtattgtttttattttacttagttcaaactattttccaattttgactgtgcttgtttttttttttttgacccatgagttatgtagaagtatacttccttatttccaaacatatgagaattttgtttttaaatttttgatttctgattatattgtgttgtggacacagaacatactatgtatttttttcttttagttctttgaaatttgtttagacttgctttacggcccagaatatggtcaatactgtcaaatgttttctgtacatttgaaaagaacatgtattatgcattgttgagaacagtgttctatgtacatctatttgttaattattttatttaacccttctatattcctactgatgttctacttttgtttgattgaattttaataatgtaattctttccttctcaccctctatcattaccttcaaagtcatatactcattttctgtttttagtaattactgtaaagatttcaaccgcatccttgacttagctattattttttgtttatgttgagcctgcatctagaaatcttcctaaactctctcattagattaaggagctattctgtagacttacttactatactgactttctacactgtttaggctctgtagtatattgttaaatggaagcaaagaagagaggacatttttgtttaattccaggctttgaagaaaatgctgtcaatattatgtcattaatatgatgttcctggtaggtatttgggtagattctctttgttgagttaaggaagtttcctagttgttgttaatttttaaagtcacaggtgcaggctgaattttagtgaatgctttttcctacactaattgagataattgtaaggtgtgtcttctttaattgatgaatatgataaattgcattaacatagatttctgatataggatgattcgtattcttttattatgttttttaatgggcaaaagacttttattctttttgagcttagatttttggtataatttaacttttagatttggaagtacatatgcaggtttattggtaatattgtgtgatgctgaggtttggggtgtgagtgatcgcatcacccatgtactgagcacaggacccaatagttagtttttcaacctgtgcccttttctgctgtgccccctctagaactccccagggtccattattgccaccttgatatccatgagcacccattgtttagctttcacttatgagtgagagcatatggtatttggttttttgtttctgcattaattttctcaggataatgacttccagctgcatccatgatactgcaaaggacataatttcttttcttttttcttttttttgagatggagtttcactcttgttgcccaggctggagtgcaatggcatgatcttggctcagtgcaaactccacctcccaggttcaagcgattctcctgcctcagcctcccaagtagctgggattacaagtgcttgccaccatgcctgggtaatttttgtatttttagtagagatggagtttcactatgttggccaggctgctcttgaactcctgacctcaggtgacccacccgcctccgcctcccaaagtgctgggattataggcgtgagccactgcgcccagccgtgattttaatttttttatgagtgtgtagtattccatggtgtatatgtaccacattttctttatccagtccaccattgatgggcacctaggttgattctatgtctttcctattgtcaatggtgctgagaagagcatacagtgcatgtgtccttttggtagaacttactttcctttggatgtatacccagtaatgggattgcaatgtcaaatggtagttctatgttttcatatgtttgttggccactggtatgtcttcttttgagatgtgtacgtttatatcttttgcccatttttaatggggttatttgttttgaagatacaatcaatttatgatcctgggagagcaagaagcaaggagccagcaagtctggacacattccagaggccacgaagggttttatgccctgagccctggattccatccaagccacgaggggttttatgccctgggcttaggttgtagtgcggcagggcagccttccactcttaagtacagagcttggtgttccataggccacaagaggtttcaaactctggacccaggacatgttccaagactctttatattatgtcagactagcaagtgttgcctcagcttttcgcccaacaattggactgatgagatgctccactgtgcccaagcatcatgggttcttagaacaaggccctgcacgcaccaaatatgttcctgtcaccacagtccactagcccttcaactataaatgtgcacaggagtcgcctgggggccttgctaaataaaatgcagcttctgattcaatagcctcgaacaggaccagagattctgcctgtcttgatgagctcctgagtgagggagacaatgccagtccacagactcacactttgagatacagcacctgggccactgtgttcaaatatgcttgataacctggagcacctattaaatatccaagttgccaggattttcttctggaaatcttgattcagcatgttttggatggagccttggacgtttgggaaaactagaatttctttctttccctttagacaaaagtcaactactgctgaggcacgggcttaataaatgttgactaaaatatccaactcaacgaccaatcctgtgtaattttcaaactgtgtcagtaacttgctgggtccaacctccataccctggccgtgtgacggatgaagaaatgcactcagacacaggtatcccatgaaacagcaggctaggggaccggcagctcccagacactgaggagggtgctgtaaagagtcagcagctgtggccctgacaggctggggctccaggcatttrttcagtacagatttaaggacaaaggtcttaagtaaacaccactagagggtaattaacattgctgacctcccaagtagacggcagtcacgtgcctgcagattatcaaaggttgatcttaggaccacatgagtaaacaagccatttagataaactcctctacattcctatgtatctacgccctgagcttttaagagaattcagctgccttcagccaaatcttttactgaagctatgcaaacctcctggccttccaagaagttttgtgtctgtttcctacaacttaatttttataatttctcccaccaccctgacagatcccctacaaaagatcatgtttcttctcagattgctcagtccagctgagccagctttccactggactcctgaatgtgagaaggacacaggctcccaggactatccagaagcatctctcatcaccttaaaactctgaaacaccggctgggtgcagaggcttatgcctgtaatcccaacacattcagaggctgaggtgggaggatcgcttgaggtcagaaattcaagacaagcctaggcagcagagcaagaccccatctctacaaaaagtacaccccaaaattagctgggtgtggtggcacatgcctgtagtctcaattaattgggaggctgaggcaggactatcccttgagcccaggagtttgaggctgcagtgaggtatgatcgcaccaccacamtccagcctgggagacagattgagaccatctctaaaacaacaacaacaggccgggcacagtggctcacacctgtaatcccagcaatttgggaggccgaggcgggtggaacacctgaggtcaggagttcgagaccagcctgggcaacctggtgaaatcccatctctactaaaaatataaaaaattagcagggcatggtggcaggtgcctataatcctagttactcgggaggctgaggcaggagaattgcttgcaccaaggaggcagaggttgcagtgagctgagatcacgtcattgcactccagtctgggcaacaagagcaaaactttgtctcaaaaaaaaaaaaaaaaaaaaaaaatacataaaaaaatcaacaaaaaaaatgagacacagaaaactgaaatattttaagtttcattttattattgcttgttagttgattaaagtaattcttcttccacttaatttttaaagacagtaattgctacactgaatgaaaccttaatgaagtttcattataagtatctattatcatttgattattttctacatagaagcatgcaaaaagtttaaaattcagtttcatttgacttagccttgactgtaatggaggactctatgaagaggggacacagtgcttatgggctggagtcccagcaactgcttggtggcagagtcccagtcgttccccagttcaagccgtgggcagatagatgggtactgtccttcagttcttcttacccattcacttgcttgctttattgcctcaaaagcccagggaatattcctagattaaaaaaaaaaagtttcagatttcagaatataacatgtgaaatgtaatgtggtactaaacccatcacattatatcagacaaaatgattctgccaaaaattaagatatttaataaaagcagttttccttggcatcttacggaagttcttctgcccgtctcacctcgagcttatgcactgcattgtcaagtgccctgtgcccgccacctcctggcttccacgtgcctccaggcatccctgctgcctgcagcacagctcacgttccagcctctctacagttgtttatggttgtcccctttccacgcttctcagtctaaatcctatccattcttcacgcacaaactcaagtactatttcacaaatgaggcttctgtttctctctccttcccactgtactgacttgattaggtaccttcagaatatctgagagtcccccatgaaactggcatacattcagttgtgtcacgtaaaccaggaacaacttggtagaataagcatatcgagtcaagtctgtgtccactaaatggtgtcaaatatttgagactgttgaatattcaagtctattcaacactcagaaaaattctgaggttgttcattaatattaattagctacttcctcatttgttctstcatctgctagaacttgttagtgaacaaggggcaacatataccaaagttcttcagaaaattctatggggaaacttaatattttgaaaattctctccctgttcctgaattttccctgtgaactgggaaagggccgtcagtatagcgtggtggttaagagctgggtttgagtcctgactctgcaatmacatgatattggccatgtgatactgtgtggctttcattcaacactgggaatctcagtttcctcaattatgagaataacctgaggtcctatgggtttgtggtggaaatyaacaaagcttacaaacttaacatgcttactagtccctagtgcacagtaggcactcaataaatgttcgctgaatgtcatgatactaaatcatgatgaacatactaaataagaagcatgcccaaagtggttaaaagaccaatgtttcctagtaaatattcatctactgatagttactaactgctgaaaacaacaaaactggctttgaatatttttactgattggcctctacactttttggttcacattccgctagcaagaaaatcttgtgcctacacccccatataatgtgctcttgcatcaatgttatgtacatcctgaaatagaaaatatagaacaaagtttcaaatatgcaataaacaggaaataaaaaatatttaatttttttttttagatggagtctcactgtgtcgccaggctggagtgcagggacacgatctcggttcactgcaacctctgactccttggttcaagtgattctcctgcctcagcctcctgtgtagctgggattacagacacgtgccaccacacccagctagtttttgyatttttagtagagacggggtttcaccatcttggccaggatggtctcaatctcttaaccttgtgatctgtccgcctcaacctcccaaagtgctggaattacagctgtgagtcaccgtgtctggcctaaaattgtttgtcttatgtactcaagtgccaacaaaccattwtgctagcacagtagcagtaatggagtaagagcaatatgctggaatatacttgatcaattttgaaaatctttactttatgatattacagttcaaaagcaggttcaaagtttatacttgttttaacagctataatattaataattggcaatgatctaaatagaataaatgcgtctttggatgtgcctattaagtcaatactaattttttagtcccacctcctagctgttcaaagtgttttttctttgatatttatttaattaatcctcttggcaagtggcactggtttattttaaaataaaatacaaaaaataggctagtgtagtggctcactcctgtaatcccagaactttgagaggccaatgcaggcagatcacttgaggccagagttcgagaccagcctggccaacatggcgaaacctcatctctaccacaaatataaaaattagctgtgcacacctctaattccagctactcaggaggctgaggcacgagaattgcttgaaactgggaggtggaggttgcagtgagccgagatcgtgccactgcacgccagcctgggtgacagaacgagatctggcctcaaaaaataaataaataaataaaaacaaaacaaaaaaaaagaaaactcccaaaatagaaaaacaaaataaattctcatctttcttggcaaactaatgagaaggtattgctttttaaaaaatggaagtataaattacatatagtaaattatgattttctttttttttcagacagggtctcgctttgttgcccaggctggagtgcagtggcacgatcacaactcactgcagcctcaacctcctgggctcaagcaatccccmcracctcagcttcctgagtagtcacacactaccacactcgggtaattttaaatttttttgtggagacagggtcttgctatgtggtcaaggctggtcttgaactcctggatgcaatcctcctgccttggcctcccaaagtgctgggattacaggtgtgagccaccgtgcccagcaatgcctgggtaattacaaaaagttttttgtagagatggcagtctcattggttacctaggctggtcttaaacttctgggcttgatcttggtgggctcaagtgaccctcccgtctcagcctcctaaagtgcttggattataggcatgagccaatttgcctagcccagaacttcctgaacacctgttttgtgtttgagaactttttcttaatcatgacacttaaaaaatarttatcaatatttctttaatatcataaaatatccaggtagtgtttaatttttcctatctcatttttttaaatgcagtgggttttgtttgtatcaggacctaaacaaggtctacccttgcttttggttgatatgtctctaaaggtttatttacaggttctgctcctcaaccttttttttctattgccatttatttttctcttgccatttatttccccacattccagacttygctgactgcatttccatggtgtcaagtaacatgttcctctattctctgatctaattcaagtttagaaatcaaggggttttgtttaacttctttgattttatacatattagtttctaacaatattaatatctaccttccaaaataacaaatcaaaagtattattaacaccatgactactcccagtgagatttctttgtaatattttttaatccttaggtactatcccactagagagatatagtcaaattatgtacttttttttttttttttgagacggagtctcactctgtcacccaggctggagtgcagtggcacgatcttgactcactgcaagctctgcctcccaggttcacgccattctcctgcctcagcctccccagtacctgggactacaggcacccgccatcacacctggcgaatttttttttttttttgtattttttttagtagagacagggtttcaccatgttagccaagatggtctcgatctcccaacctcgtgatctgcccacctcggcctcccaaagtgctgggattacaggcgtgagccaccgcgcccggccagtactatgttttaaattcaccttaaattaattcccaggatgggcacagtggttcatgtctgtaatcccagcacttcaggaggctgacgcgggaggattgcttgagttcaggagttccagacctgcctgggtaacatggcaaagccccttctttacaaaaataccaaaattagcagggcgtggtggtgcacacctgtagtcccagttactcaggaggctgaggtgggaggatggcttgagcccaggaggcggaggttgcagtgagctgagattgcaccactgcactccagcctgggcgatagagccagactttgtctcaataaataaataaataaatatcaatcttatgcattattatgtaaaatatttacacagttccaaagtcaaaactgcaaaacaaagcacactaggagaaacctagcttctatctttgtcccctctatcaaatccccgtagcaataatattattagtttgattagttttccccttatcttgcctttaaaagaacataagccaattacatgtgtatgtatatgtgtatatgtgtatgcatgtgtgcatgtgtgtgtgtgtgtgtgtgtgtgtatatctatatctatatctatatctatatctatatctatatatctcagagggatcctactctggtcttgaccctcttgccatggggtggggggtctgtagggacaagagaatatgcccaccccagagcccatatcctcctttttagaccctgcaactccagcatccctgaccacatggccctgagtccacttccagggtcttccctggtctgtcatcctgagtttgaacagtgttgccatctcactggtgctacaaggtggctggtgtgagggggcactggcatggggtctggatggcattttgatgggtggggtggggtattcacgtttgcaggcaaaccctcttagggtgctrggggtcaaccaagggccgaatttgaacctggccttccaggtggttatgaagttgtatttgccaagggaggagattagaacacatttaatctaatagtttgctagtttgatttataacytttaaacacttgttataaactayaaagttataaactttaaatacttgtattgtattcttgtcccaggccctgccattgttgggaacagggctgggcccaacagtcacaytgtgggtcttctggaggcacccaggatcagcagactgcagtgaagagtaccacatccagagcccagaagcgccagcctccagcggragctgcactgaaactctttgagcccatttcctgtgcagcccaaggcacaaatacatcagccctgcccgccacaggagactrtgggcaagctgtcacctgcaaacaaattctcttgctacatacttatagtgtacacatgtaagataattccctatagctgtttctaaggtttattaaataaatagttgaaaatataaataagttgcataatactatagttaaagccacctggaaatagaagcgtcatccattttcatcagtgatttgaacactattccctctttttccaacctggtgcgaataaactgtagtaccagcattgtggcaattaggtccaggagacattctcttccttttacacctaaaaggaaaaaaactccgttaagtctgttggaaactctgcatctcaaactgtgcctgtttataaaattctcattaaagaattacaatacgccatctggctaacacaatgaaactccatctctgctaaaaaaaaaaatacaaaaaattagccgggggtggcaggcacctgtagtcccagctactcgggaggctgaggcaggagaacggcgtgaacccgggaggcggagcttgcagtgagccgagatcactccactgcactccagcctgggcgacagagtgagactctgtctcaaaaaaaaaaaaaaaaaaaaaaaaagaattataatacggttaaatcacagtacatgagcagatcgtgaaactctaatactcttcaaggtccttaaatggtttgctgtttaaataaaaaatgaggacagttagacccgtgtgcctatgatattatcctgatcattgtcaggaaactgaactgtatccagagtgcccctcacttgccatcttcaataaccaaagagccatgaagttcactaaaagaaatccagtttttaggctcctgttacaaatagcttagaagagtaaacctaaatattcaacagataaacaacagatatgactaattacactggtgtatcaaattatttctagtggttagtacctataggtatccaagatattttactatattatgaaatatcaaaattgaaaaatgaatgtttacatgtgttgaactcaattaacaacccattttcattttaaaaatccaagcttcttttttttttttttttttggagaagacaggggctcactctgtcatgctggagtgcagtgggtgtgatcagagctcactgtagcccccaactcctggactcaagtgatcctcctactttggcttcccaaagtgttgagattataggcaagagccacaacacatagccaaaaaatggttttagggaagaaaagaaaaacccaaatctttgtcttataattaagaatatacaattactttttttgagtaaagacaaaaggacttggcatagtatgtacatatctgcatatacaccattaattttacatcgttgaggtagccaaaactgctcgtaagtgggcttttattaaataatataatgttcttaatagaggaaaaaggaattgaatacatttttaaaaacaaaataacaaaaccaatccattgtcccacaaaagaaaatcagtggagacaaaagcagtttaatttgctggattcttttgtggcttattttttgagtattatttacaaaatgttagactaatttttaagcaatattaataataagcaacatacaactccaagaataatataataaataataaactgatgaaatacctaatgtgtatcaacgtcatttaaaaaacaaattcagaaggagaggggatgataaaagagaaatgaagaagaggataaaagacaaagttgggtacagagatataaaaacaagtcagagaaaaaagacagcttgagactctacgtcgaagaaggaaggcagaaaagcacacgcttacagaaaaataacacagataatagggagcaatacagtgaaacacaggaaaagcccatggataaggcacatctgtgaaatcccatccccttgcatctgtgactcaattttctccagttttcctcttgtttctcaggccgctccttctcagcgtctttgctgtttcttgtccagtctgaacactaaaccctgctgtgcagcaggctggtcctagcacctgctctgctcagtccaccttctttctttgggtgatctcatccagagccaggctttaaatactactaacgttgagaattttcccagtcttttccaattctgacctcttccatgagctccagcctcacttgacaatatatttatcttgaatttttatctcactttgtcacctgggctggagtgcagtggcacaatcactgctcactgcagcctcaacatcccagggctcaggtgatcctcccacctcagcctcctaagtagctgggaccacaggtacacgccaccatgcctggctaatttttgtagagatggggtttyaccatgttggccaggctggtctcgaaatcctgagctcaaatgatctgccccctttggcctcccaaagtgcaggcattactggtgtgagccacygtgcctggcttatctttggttttcaacagtttgactctggcctatctaaatgtggtcatttttgtatttatagtgcttggagttctgctgagtttgttggatctggaaggtgctgtctttgatcaattttacaaaaatgttcaaatatttttctatctaacctttcaccttctgaaaccctggttacacaaatgttaaaccttttgatatcattccacagtcttggctcctctgttcttttttcattctattttttttctttctatatttcagtttaggtaagtttattgagtgcattgtcaatcgaattaaatgatttttttcctgttctgtccattctgttgttaagctcattcaatgaccttttcattgcagatactatattttccagttctaggattttaatttggtttttctttatagtttccatctatttgctgagattctgcgattcacccattccatccttttctggtaagtcaatccttcactatatttttaatagcagttttaaagtctgtgtctgctaattctaacatctgggtcatctgtgggtcagcatttatagcccattttccccttgatcaygatcatattgtcctgcttcttcgtatgttattaaattttcattccatactgaacattaaaaatgacrccttgtagagactctcagctatgctatcttactctaaagaatgttcagttttgttctggtaggtcctgtgtaggctttgttttaggctttattaggatgggtctattttggcttatccctatgtcctggggtatagtccttgatcatgagatatgatccttatgacccttttatggtttcaatggaaagatatttataaagtctctctaatttggtgccacttgaactctaaactctggccagtactaggcagcagctgaaatctctgcttagctctgtagcttcccagctgttgcttttttctggattccttgaggttgcacctgtrtatgtagaggttaggagacagccaaggatctgmggggtatctggatgcagatttcagagttccctgctctgtggttccctcctttataggattttaatccttaacttccagccactttggcaaccttaaactccaaccccatgtcctcatcccgttaagactttctgttttagttcaaacatcccattgtgtctcatgagctgagaaatgcctttaggtgacaagctggatacgtgtggagcccacctagttggctttctttctttcaaagattatgttcactctagcttctgcctgttttggattattctcctggccttcaaagaatggttttaaatattttattcaaagttaataactgttattggcaggagagttagtcagatagaggctcttctattattccaggatcaagcactcactcctcacgtaaattgtcatcacccctttttggcctagtgcaggtcaaacaggctatgcatttgcccacccacccagcctggaatatgaaaactctggcattttagaggtgatggtggggcagtgagacgctgctgctctatctatccatgaatattggctagttgtttaataatgtgtattttatttwaaaaaaaaatctccaggctgagcatggtggctcatgcctgtaatcccaacactttgggaggccaaggtgggcagaytgcttgagctcacaagttcgagaccacactggacaacatggcaaaaccccatctctaccaaaaaatacaaaaattagtcaggcatggtggcaggtgcctgtagtcccagctactcaggaggcttaggtgggaggatcccttgagcctgggaggtagaagttgcagtcagccgagatagtaccactgcactccagcctgggcaatggagccagaccttgtctcaaaacaaacaaacaaacaacagctcctgtcctagggctagcatttgaccttcaaaccacttgctgggtyaaggatgctcaggacttcctcatctatccccttgttgtcatgataggaaacaggtccagaggttgaacaaytgcctctggcagaggctggctaggagctcatcagagctcttttctcctcctggacacgcagcttaacagtacatttctcaggccttcgtacatggatggggctatgtgactagtattcttcctcttgtctagcagggggatgatgccagggtaatctttgttcttctctcttaccaggataattttaaagacatatattgaagatggtggagccacagtatggaaggagtcaaggtctctaaatgaccacataagtggaactttcttcctgaccaatayttgactgtgatacggacaaraaagtaatctttgattaccatgttaagcttctgagattttttttacagcacttggtgctatttatgctaataaatttgctcagataataccctaattagtggtaaaaatatgactagaaacccatctcccatttcctttaatggttaaatataattccattcgaatataactttcataattattacattaatacactagcttacaaaacagtttayaacaattaggagcatgcttattaatgaatgaaaataatgacttaataaatggaaacatagtgccttacctagagattgaatgcctttttgtttaagaaagctgtgcaaaccatttgtattaagatttaatataagtcccagttctggtgtaagtttccagaagccatcctacaaaattaaggaaacaaaaataagttatgttattcacattttatcacataagaagttacgtagtgggggaaggagtggggcaagggttgaaaaacatattttcactacttgggcaacaagacaattagaagcccaaacctcagcaccacacggtatgcccatgtaataaacctgtacgtgtacctctgcatctaaaataaaactttaacaaattaaatgaaaaaagaagttatgtgataaatgtttccatttatttcagttaattaaggcatttctaacatttttaytactgtaaaataaagttcttcatacactagtgacatagtattgtttggaacctcataaatgctatgaacactacatatctggtggcacttataaaaagtgtggaaagaggctcatgggtagagattttttaatttttattttagtagagacggggtttcaccgtgtcagccagaatggtctcamtytcctgacctcatgatccacccgcctcggcctcccaaaatgctgggattacaggcgtgagccaccatacccggccgagatttttttaaatggtacttttttccttctagcaatgctttatttcattttttattgatacataatacttgtatgtattttgacatacgcatgatattttgatacatgcatagaatgtaaataatcaggtcggggtgtttaggatctccatcagcttgaacatttatcatgtctttgtgtcggcaacatttcaaatattttcttctagctattttgacatatacaatgtattgttaacgatagtcaccctactgggttgtcaactagcaatgagcattgaaccggtatttctcaagcttttaaagtatatgtcatgcatgattccctctttaaaaaaaacccactttattgaaatatgattgacatacaaaaagtcaccaacatttaacgtatacaacttgatgtgtttggagttaaatatacacctgtgaaaccatcaaaccatcacttatcaatgccatgaacttagccaccactcccagaactttccttccaccccttttgctttgttttgttcccttttgtggaaagagtacttaacataagatagacctcttagcaaatgcttcagtataccacatcggattgtcaatcataggccctgtattgtacagtagatctccagcatgattcctttggtttaacataaaaatgtaccctgatgtagtctgaaacatgaaaatgacagttttttctaagcataaaattgttatattaaacatgcactttaaaactaccttccctgcatcccccatcatctgcctgccccatcacatgcacaggagaatgtgctaagcctgagcttggggatattaacctcaacggagacagaatcaagaccctagggaaaccaacacagggagtagaaagcagggtgtggtcctaggcaggtgcacaggttgaagaatctatggcaataccttgaaaaatgaccgcagtgataatatgtaccaacccatagagaastggtaccaggtgctgttctttgatatgtttagccacttcctgtggagtactattgttgggaaaaarctgagtgttgggagggaaactgaggcagggcttgcgtaacgtcctctggaatgtgtctagacttgctggctccttgcttctagccttcctaggctcctgttcccattatctcaagtagcagaatatgttccatataaatgctaaaccatcgcagctgtaaatcatgtacttaatgcaacgtgtccttttgacctccacattctcaccatctgtttctttgttggattatcaataaataccgtgggctcccagagctcggggccttcgcagcctccaccatagtgatggcatactrgtgtcccacctttctctctcaaactgtctttttctcaatcctttgactccactggactttgtcacccccatgacctggtgttgggtctgatcaccccaacaactattatcacacccacactggagatgagaacatggaggcacagaaaggtaaagcaatttgtctaaagtctcacagctaacaagcagcagagccaggagtggccgtgggatccacactcctgaccatctgcagtatgctcctggcaggcttttgggtgcactgtctcaagtagggaaactgggcagctgtgattatcctgtttaaacctcaaacccactctgtgaagtagacactatcattatctccactatatggatgaggaagctgaggctcagacaggttacctgacttgccccaatcacaaagtgggctgggactcaggcttacttttatactacatcaagccctttccgtttcactaaactacttgacaccaaaacaagtaatcacagatgcaggactgggtcttagtaccagcgatggggccaaatctacagggtgtttatcagcttaacaaatggagtgataagctctaacacaatatacatgttgaataatatctgtattcccatgacctatgtgaaaatatttagagtacaggtrcaagtgcttgtgctctacttcacagtgggaaatttatgtggattacaatccattagttctagaatctaggaaattaagatctcaccccatcatctgttcagagatgttcattttcaygtgaggaatagtaacattcmccagcatgaggttctggtctaatgtttgtagagaaacaccagccagcatcaagcacactgttttgttcagctgtctgttttgttttgtagcaagagttcctcartgaaggaagcagtatgatttataccccagtgtacaaccccttccttcactacagactgatgatagacggttccttgaccagctgctttgaggagccccgttctaaactatgaagccagccaaccacagatttaaggagaaataagacacatacctctgtctgtagactgaggagttctgtccaaggcacagcatcctgccagtgttgtrtgcacactatttcatcctcttcttttacttccagaaagcacrggatactgtcatcttttgtatcacattttatttgtaaaaagcagctgtcttgaagtacttctgatagctcatcactttctgtgtcagaactttgaaaagcaaagacaggacatcgacttccttcgagactgcctactgattcttctagaagacagagatctactggggtagtccgggactgactgcaaagagcctcaggtaaagcagaggccattggcagcctaaggttggcagtcaaagagsctgcggaaggttgaaaatgaaaaggagagkaagcagagggatgataagacccaaaacctctgatgggatcagggtctgtaggaagagagaaatgaagctggggagaatccagctcagggaaggtgccagcagaaggcctggtagtaaagcctccaggatgttgcagtggagcagactgtgcagagcttaatgagctccctgaaaaaacaatgccacaatagggtgmagaaggtgggttctggggaggtcctgtgggacaagacgccgactgtgggatccagtcagcacaagtgccaggcacagggccttggctgaattgagatkcatcaaactgtctgggaggagcagctgaaccgaaactagctacctgacgatatgaggcaaaagacaaggaagcaggactgtgagcgcgggyagtcggggkaagataggaaccaacggccggagccaaaataggaaaaaagctagaagtagatgtttcccatggactgactttcttaaatagtggttcagttgctgttggtttacatgactctgtccaacttaaatccaatagcttttccacacstccacgttccaaatttgatgtgaaagctggtagtacacctaagscatcctcttcaaaatcwtcagaaacttctggctgagataattccatttttcttttggaaaatggaattttcctatgttttcgtttggataaacgtaattctggccactcagaggatgctaaaagagactgcccagaagacagaattattaacgtaaggggaaaacacagaataaaaagaacaatcaagcaaacattcttcctagcacttgacttcccacccatcaggcagttgctcatccagaatcaggatcatcaatgtgagctgggatgttgaaaataacaccagtgctgcgtgcagcrgctcacgcgtgtcatctcagcactttgggaggccgaggaggaaggatcgctcaaggctaggagtttgagaacagcttaggtgacacagcgaggctccatctttacaaaaaataaaaaattagacaggtgtagtggctcatgactgtagtcccagccacctgggaggctgaggcaggaggagtgcttgagcctgagaggctgaggcagctatgagaacagatttgcactactgctctccagcctgygtgagagggcaatattctgtctcaaaaaaaaaaaaaaaaaaaagaaagaaagaaaataatgccaccagagacattcaagatcatttcagtacaaggctgtctatttctagacatggaagctgagacctggagagaatatcagyaatcaatatattgaaagaccttctctcttagttcttagttcttagaattgcggaattttaaacacccctcattttacacatgagggaactgaggagcacagaagtgacttgcccaagattttacaatgagcagtatcacagggtgtacttaggcctaaaataagacagtcatttgaagtcaattattgcagtttttatactgctttacagcaatattaagaaaatgagatcaaaatggaaaaacagtctcaaaagctttatttatttttacttactcattttttgagacagggtcttgctctgttgcctggggctggagtgcaatggcacaatcacaactcactatagccttgaactcctgggctcaagygatcctctcgcctcagactcccyagtagctgggactatgagcatgtgacaccatacccagctaatttttaaattattcttttgtagagatgtggtctcattatgttgaccagactggttttgaactcctgggctcaagtgatcctctcagcttggcccctcaaagtgctaggattacaggtgtgagacactgtgtccagccaaaagctttcaagtaattaaatgaacatataattatactagaacatgaacaatatgtatgtaaaacaaattttgagggatgctatattactactattgtttcaatctaaatgtaaagagtgttccttaaaaagttgcatgtataaaatccagttttatatgcatgtcaagtccttgatatttttgaaataattagcctgtaattttacctgtgaatatgaatgatttaaaaaaggagtagtcctttcccaactcagtcaaatttcaagtttatacctgaataattaatattatagaacatatgaaaagacatattttaaaataatgctaaccagaggttaaatttttaaaaattagagaagcaaactggaaaaaaccaatcaatagtgatggactagaactatcagatattaaagtctcttataaaattataataattatagtagacgaatcaatggaacagagtaggtaagtccagcaatagctcctaaatctgagaattactagattatgaaggtggcatttcaagtcaataagaggaaaaggaggagccatctggaaaagaataaagttggttccatatctcttatcctatgctaggataaatttcaatcagatgaaaaattgaatgtaaacatgaaaacataaaactattttaaaaataaagggaaaaattttaaaagtataatctctgactaggaaaggtatttctaagcatgatgaaaagcaaaacaacactaaacaaaaagaagaaacacaaagattaaaaatttgactgcattaaaaaatctgcatgaccaaaagataataagcaacatcaaaataacaygtggaataccgggaaacaaattttcacaactcatatcacaaagggctaatttccctaacataaaaagtttacctaagataaataaaaaaatgactaaaatctcaattaaaaaaataaaagatgtgaacagataacacccaggaagtgatacrtagggctgtaagaatataaaacatgctcctcttcattcataaagaaacaaaaacttaaatgtcaccaatacatttttcacctgtaagatatgcaaagatcaaaaaattgattaagtcaggtattgtggagcatcccagctactcaggaggctgaggtgagaggatcgctggaggccrggagttcaaagctgtagtgctctgtgatagagcctgtgaatagtcactgcaccccagcctgggtgacagagtragactccatctcaaaaaaaaaaaagaatcatactgagaaatacgggtcatttttgtttattttataaaactccttcttgaatagtatttttgtattttttagtagagacagggtttcaccatgttggccaggctggtcttgaactcctgatctcaggtgatccacccaccttggcctcccaaagtgtggggattacaggtatgagccaccgtgcctggcctcattatgattcttctatttgtcaaaatcactcacttgcttcctctttcccttcaagttcacaattgcttattttgcttaaccacatactcacatcttgatcacctaaggtgtggtccccaacctttatggcagtggggactggtttcatggaaggcaatttttccatggacaggggtggggcagatggttttgggatgaaagtattccacatgttccatatgcacagttcacaacaggttcggggctcccatgagaatctactgccgctgctgacgtgacaggaggcgagctcaggcggtaatgctccctcactgcccctcacctcctgctgtgcagcctggttcctaacaggccagggactgggggttggggacccctgatttaaggaacagcgtgggctctggaccctcagcttcagtgccctcaatttcttgctaagagttatagcactgaattttacaaatgatttactttaaaaacttggattaggaggtatgttttaaaaatctctgcctctcgcttgttctcaatgtgctttcatgagcgggagggaacgaagtggatttggggttggtgcagaagacactgcgcctaagcccaggcgtggctgtgggaggacaagagcacacagcactgagcgctgtccttcctgagcacgtcccagcagaaaaggtgttgcgctccctggagggtctcatttcacaatgaagatgtatcaaataaggaaatgccccaagcttcagcgagtcgggaaggaccaaacagacctggatgtccgggctctattgcggctggcgtgttactgaattcagtggaatgactccgtgtagaatgcggcaggtgccacattttggtaaaacagatatcgaggaagagtaacagaggcttgacatttttgctaaattacatggtccgttcaaacaacttattgcagctaacataaactttcaagtcatcaagctaatggataatatttttcatctgatatgtttggatctggaagtattaagatccaacgtatttgcaaatttagtatgaaataatttatcatcacactgtattaaaacctaaattaatttagaaccaattttgaaaataatttcaaaaatttctataaacaggccaggcatggtggctcgctcctgtaatcccagctacttgggagtctgaggtaggaggatctctagagcccaggaggtcgaggctgcggtgaactatgatggtgccactgcactccagcctgggcaacagagtaagaccctgtctcaaaaaaaaaaaaaaatctaaaaacaacacatgtgcactatgagaaaattagaaaatacaagtagacacaagtagacagacacaaagaagaaaataaaagccatacagaatgtcttatctgatctatggcctatatccctccagaccttttctgtgaacaaaacacttaacgtatgtagcagagtgtaggggcgtatctcttatttttgttaatttaatttttattgtgggaaaaatgtatataacaatgtttgctatgttagtcatttttagagtttagtggcacgaggtacattcacactgttgtgcaaccatgaccatctccattttcagagctgcttctgggtgtgcccttttgaagcacatataagataagtatatattttccagggcccattttaacagtaagtctcaaggacaaacagttgattcttaattgtacatcagaatttttttttccccaaaacaatgcactccaagggcccctgtgcagtcagagagaggccacaggtcacagcccctcagcttagcccctcgctttccttcaagcagccctgagtcccattctttggctgacctggaagtccggaccagtgtgggagcccacgatgttgccaacatctgccctgcctgtgggtgagcctacggggccacctgagcctggctgaatgcacctcctactactcctgactccccaaactctttgtgtttgcttaaagtattatttttctttcatgggcaatccatgcccatggttcaaaattcaaaatatacaaaagggtgcactgtaagaaagcaaggctggggacagtggcccatgcctgaaatcccagcactttgggaggccgaggcgggtgaatcaggagttcgagactagcctggccaacatggtgaaaccccatctctactaaaaatacaaaaattagctgagtgtggtggcgcgtacctgtaatctcagcaactcaggagactgaggmacgagaattgcttgaacccaggaggtagaggttgcagtgaattgagatcatgccactgcactcaaccctgggcgacagagcgagactctatctcaaaaaaaaaaaaaattaaaattaaaaaaaaaaaaaaaaaagaaatcaagtatccctccaaacccaaggccacttttcagctttctgccccatctgtttgggcaacagtgcccgtttcagacacctttgagaattaataactacagctaatatttatcaaatatccaggagctagacgtgttggaatggtcttagaactcttcacaaccacctgaggtggattttactgctctccccactagggcattaggactggggcactgggraggtcaagtcccagagagtgaagcgcgggctggggttcagacctgagcattcggccacagcacctgtgatcttaaccactgtgtttactgactttcaatcatctaccttttgtgatctttgccaacctgacagagttaaaaaataaaaaggaatctcatggcagtttacattttaacttcttttagaaacaaggttgcacatctttcrtatattattttcttatttatgatcaaatcctcactctgtcactaaggctggagtgtaggggtgccattttggctcactgcaacctctgcttcctaggtgcaagcatcctcctgccacagcctcttgagtagctgggactacaggcaagcaccaccacgcccagctaatttttgtatttttttgtagcgacagggtttcaccatgttgcccaggctggtcttgaacttgtgggctcaagtcgtctgctgcctcagcctcccatagtgctggaattacaagtatgagccactgtgcccgccctaaaagactttttgtagagatgaggtctcgctttgttgcccaggctggtctcaaactcctggctgaagtgatttttcccacctcagcttcccaaagtgctgggattacaggcgtgaaccacggtgccggatcagattttaaatttttaaattctggaaattttagttttttaacctagagacctaagagggttgtcagcactgtgttgttcctttgtttttgaatttttcttccaatttttatttaagccacatttttccatttctattatgtttctggttataagggccacggtataaagcactataaactttaagaaatattggtggtgaatttagattattagatagcacttctattgataatttcatgacaaacctattatactacctaaatgactttagcttcctggatgacaatctatttgcccatgatagaagcacagccagaggtgttctctttttgtactatacagctccattcacacattgtgaagtctctgtaatgcaacatgatgtaattcaacattttataaatgcatgaatattttccatcatcagggatacaacttcttcatgtacaggtaagaagggagctattttagcaaagggttcccttcatcttcatgaaaaaacgaaagctcaatatcaacttattcggtaatcagcatttacctggttcctgacggcttcttggggctccccctgccagctcatgtagggcaggaagtctacatcttctttggcaataagttcagaaacttttggaatatcaggaaaaggcgactcattctcatcctatattgaatcacaaatagattaaatcaaacagatgttatccaattaaatgatgactacacattctaaagcctatggggtgttggtttgggatatgctggtgtgtgggactggagcttgtgctgtgggccacaagcgtgaggggaagtggggaggtggagtggctttcctctttacggagcactggcaggtgctggccactgtgctgggcaygttacgtgaatttyccccttaaacttatgaaggggaagggctctcagggaacccaggccttttcggccttttctattttttgagggtcttggattaataaaagacaataaaygccaaaactgtaacaaaattatagtataaccgaaaartacacattagccaattrttaataataacattaaaaatgataacatactcaactcatttagaaagatcaccctaagtcccaacaccgaagccccccatgaatgggaggctgggactcrtggggcctgctgrcctgtctgcaacccacacttcmcaggcccagggygtggatgtcgtcattaaccatcaaagcaagggtgactttcttaaygtggaaatayaaataaaataatttaacctygaattaccaataatacatacccttttctcaactgccacaaagcttgtaaattgtgttatgagagagttttctttactgagtttaataatcagagatttcaaggtttgttttttcatctaggatagaataaaacataaatcatgtcctgttttatttctatttmgctatgtcagtaaatcattttaagattcgtatttcagactaaatattgaattgcaggtcccatctaaatcggtggctcaatattccctttaaaatgagatgaactgacttagtcatagaaartgtcgctcttcattattcagctccctctagttcagagagctctcccgggcagtgggctttctcattctttcacagtctgtggctcccaatttaaagctgaggaattggaaagatggaatgacttgttcaggataaaagggccttaaacaaaacagcacacagaggctgccaacccagcrgcatctgaggagaatagggagaccaccaggtgaccatctgtcactagaactgactgtgagggtctccagggcctgctgtcaccttcttgtggggatggcattgaggactaacgttcacagccttgttgaagatctcatccctcagagaacagctgggcagtcccggtggcctggctgaggggcccctctgctgaggccctggtctgcacagcatggggggagtcaggtgggctttggcaggtcactcagcatttcgctctcaggcctctcatcagtaagatgggaatactaacgctaccacacgagagatctgaggtgacgtccactacaggcactcagcgagtgttctctgagccctcctcgggcttcttctgataagtaaaacattacagaattttctggaaaccactgacatccatccttttgttaattcattcaacaaacatttaccacacaccccacatcccaggcacagtgtcacagatacagtgatgaatgccctgacaccagtctccttctccacgcagctgacctcactttccatttccacagataaaatcaatgtaagaatgctcaagaagaatgtctaatcatttttacaatgaaaagaacaaacctcatgactggtttcattttcgtgaagaatgccatcttcataatctctgattagagctcgggctgccagcttgtggatcatctgtgtttaagcagcaaaggaaaaaaaatattcacatggcttctaatataagacttgcaaagaacatcattttaaaaayggaggtataatctgcatacagtaaaatgcactcctcttaaatacacagtttgatgagtcttaagggatgtatacagttgtgtgactactgttgaagtgaagacacagaacattctcttttccctgaaaagttcctgtgtgcccgtgtagcttcctcaagccctggcagctcctcatctgctttctgtccctagagttttgctttttctataaaaggccattttgctaattcattttatttaaaaaattgaaaacttcttttctaccatgggaagagccaccttggccctgggatgcccgtccgtgaacatggtctgcactctgaagggtgaagactgcacaatgtgcaccaccaggtgcttcctctccaacaactgagagatggaacttcccttcattccaactcttgtaatttgtcattgataaggctgcttctcacagaggaagtacaacttgctgtgactttatggaaaacgacctcttcccaggtaaaattattttaccttctttcccccttagatctaatttttaaaaatatacttttaatttattctcccttatcagtacccacaaagatctaatttttaaagcaatattgagcttaagttctatacataagtcactggcaactagtaagtcaatgataccgatttagtgctgaaaagtaagctgtgcacttttgagaaaaaaacccagcaatgtctgggaaatgatttatctggttatactgatactcctttgaataaaaaaactacataaatagcatatataggctaggaactttcaaggctaaactacagtggattcagtaccagtgcaaatattacaaacttcttggtaataatttgtgatattgtgatatgcaaaaagctaaaataggccaccccaaaagagacttctttggcatattttgagatgctattcagagggacagcagacataggagtagctctgaaaagcagtccttttgcagggaatatttgcatctgcagaggaatcgtatgtcagtgaaggaaacagcagatgcaaacaggctttctctgagacccccttatctgccttatccagatttaggaaagatgaactcccaggaagaggaggctaaagtctgatactttaaagggatgatagagaaaccgttaccagaggtgcttctattctctcagggctgctgcctgccagacttcatctgcatcacaagaaagcctttgctcaccacgtgtttcttcccctcaccctcccacaacctgtccccacctcccccaggagccccacaatcctacccgcctctgtacggtatgaaacttcgctcatctggcccttctttgagtctcacgtggctcgtgcacacgtaacgacatctgcatgtcttttcccctgttaatctatcgttggattattttatagaccaaacatggaaacttcagagggaaagtctgaacttccctacagacataagaaatgtatgtatttgttattcctaacaggacccttcaaccacacctgagtttatgttaatgaggtgacttttagaaagtccctagaatgagggctggttgctggggaaccaaccatatgattagagggctgggacttcaaccccactccccaacctccagggaggggagagttaatcaccaatggccaatgatttaatcaaccaggcctttgtaatgaaacctgcattaaaaaccccacctaaaggggttcagggagcttctgggtcagcactcatgtgccaggaggatggtgcaccccaactgtatgttagacagaagctcctgtgcttgggactattctgggccttaccctgtatacctcttcatctggctgttcattcgtatcctttataatattctttacaataaatcagtaatactaaggtaaacttttcctgagttctgtgagctgttacagcaaattactgtaagaaatttgagaaatttctgtgagaaagggttgtgggaacactgacttggagctgaccagaagtgtgggtaacctggggacctgctacttgctaccggtgtctggagttggaatcagtcttgtgggactgagccctcaactctgtgaggtctgtgccaaccccaggyggccagtgtcagaattgaattaaattgtaggacatgcaactggtgtcagagaattggttgggaaaaacacatatctggaaaccagaaatggtgtatttgggaaacaggaattttttctttcataattcatttgcttttaatcaaaaaaggaaataaacccacatcctcaatatacgatatgatctactcttagtccagtattattataactagtatttctaaatagcatcagtaggccagtggcatgtacctttattgagttatgaacatctttgagaacctctctagcaaaatttccatgcataaatgccatacttaattgcagttattgccacccactgatgcccatatagacatacctagaccaaactaccccagatgaagaagtgctgcattagaaactgaaggaaagtatactcatttgtacatatagtccatctccatattgtgtaatgaaatttcaacacaggaaaacaacaaagtacagacagcaggggtatccaatcttttggcttccctgggccacagtggaagaggaagaactgtcttgtgtgacacataaaatacactaacactaacgatagccgatgagctgaaaacaaaaacttgaaaaaaaatttcataatgttttaagaaagtttacgaatttgtattgggctgcattcaaagctgccctgggccgtgggttggacaagcttgacatagagcattatacatggaaatataaaatcataactttgaaacaatgggttgatagtttaggttttgaatcttacagttccagttgtcttctgaagctcagtagtcgacaccattgtacaaaattctttctcttgaattagtgcacacagagttgcctgaaatgggaaaaaaaataaattcctcattagcctttccactctgcagtgtcttggtttaacagaaattcttttggtgattttctctcccctttcaataaaaactagaagcctccccaaagccctggctaaccaccagctgtgttcccagaagaagaaaatctgctggtgagaargggagggaagaagacagaaaaaaaattagcaaaatatattggtcttcccatagaataacaaactctgcgtcttcttacytgtgtgcagtgaggaatgaatccatagacaaggagtcgatcattgmgaaacaaggayggcacctgggctggggcctgcagggcctcgggcrcatctggattgagttgctgccatttgacggagacagagtggcaactcggagaacatagcctggtcatttggtcttctatctatttataaaagaggaattatttctctttcaaygctccatccagaaaatagttacttcacatttaaaataaagtayacattctatcctttgggaattttataactctttggtattttctctccttcctgctacagggtactttcccgaaaatagtttaaacagaattttattttattttatttattttattttgagatggagttttgctctgtcgcccaggcgggagtgcagtggcacaatcttggctcactgcaacctccccctcccaggttcaagtgattttcctgcctcagcctcccaagtagctgggactacaggcgtacaccaccacacccagctaatttttgtatatttagtagagatggggtttcaccatgttgcccaggctggtctygaactcctgacctcaggtgagccatctgcctcagcctcccaaagtgctggggttataggcatgagccaccacgcccagctagaattttaaataatagcatgatcatatccttttcatttacaaagcatcctgaaattatgcctttagctaattactaatatgcagccttggtatgagtagattccagtacttgaatagatatttctccaaagaagatacacaaaagccagcaagtgcatgcaaagatgcttgatgtcattagtcattagggaagtgcaaatcagaaccacggtgagatcccatttcacacccagtgggatggctgttattaaaaaacaagtggtggctgggcagagtggcttatgcctgtaatcccagcactttgggaggtcaaggcaggcagaytgcttgagcttggaatttgagaccagcctgggcccatggcgaaacactgtctctacaaaaaattagctgggtgtggtggtgtgggtgtggtggtatgggcctgttgtcccacctacttgggggatgagggaggaagatggcttgagaccaggatgtcagggctgcagtgagccaagcttgcaccactgaattccagcctgggtgaaaaagtgatactctgtctcaaaaaacaccaacgacaaacaaaaaccaaccaaacaaacaaaaaacaataagaaaaaaagtggtggcatacgcctgtagtcccagctactctggaggctgaggtgggaggattgcttgggctcagaaagttgaggctgtggtgagctatgattgtaccactgtactccagcctagatgaccgagcaacactgtgtctcaaaaaccaaaacaaaccaaagaaaagctgattgatttcaatcaataaggaaaaaaaaaaagaatgatgagtgttggtgaggatgtggaaaaactggaatcctggtgcactggtggtgggaatgtaaaatgatgcagctgctatggaagacagcatggcaattcccaaaaaaactaaacataaaatgagcatatgatccagcaatcccacgctgcacatatatccagaattgaaagcagactcaaacagacacttgtataccaatgctcatagcagcattattcacaatagccaaaggacagaaacaacccaagtgtccaccgatagatgaatggataagcaaaacgtggtccatccatgcaatggaatattatttagctttaaaaagaagggaaattctgacacatgcttcaacatagatggacattaaaaacatcatgctaagtgaaataagccagacataaagggacaatgtcctatgactccacttatatgagatactcagaaaaggcaaagtcataaagacagaaagtagagtcatggttagcaggcgctgggtgtaggagggaatgtggagttactgcttaatgagtacgtagtttctgtttgggctgatgaaacagtttgaagatggtgatggttgcacagcattgtgaatgtagctaataccactaaattgtacacctaaaaatggttaaaatggccaggcgcggtggctcacgcctgtaatcccagcactttgggaggccaasgtgggcagatcatgaggtcaggagatcaagaccatcctggctaacacagtgaaaccccatctctactaaaaatacaaacaattagccaggcatggtggctggtgcctgtagtmccagctagttgggaggctgaggcagaagaatggcgtgaaccygggaggcagagcttgcagtgagccgagatggcgccackgcactccagcctgggcgacagagcaagactctgtctcaaaaaaaaaaaaaaaaaaaattaaaatgctaaattttatcataataaggaaacaatttcagcaaaacatatttaataattcactttaaaaaaaatcagtccatgatttttaaggcagaaatcaaaccataagctgggagaatgacctgatgaagaacacctgtgttcccgctggtgcagtcctgaggcagggctcacacctgcggcagtgcttgcctctttamggctcccctctcattcaaggaaacacagatattcctatttcttastctcggaagaataagagatttccaaacataaatataaaaccagatgtttaaaaaacatacctgttttctccaactatgcttggattttgcattaaaatattcaaatactccggcaccacactgggacaaaatccttaagaygtgacgatttgctgtagaactgatcacatttcacatgttttaattttgaagacattagaaatatttttgaagtacatgttaacagtgttgaraaagctcacaactcaataggagagacatgacgtggggaagaatgtactcgtgtgtcgctgaggttaaacagagaaagtgataatagaaggaaacatctgaaagtttggctaatttaagctcccatctatcagaggactgacttatccttcaaatagaaaaaagttgaaattcttgactttcagttcctgagggagggagtagatgactctaaaaacaaccctataaggtatcagaatgctgacaaagatatcaacttaatttccataaataacaatattacctgaatctgatcccaaaggcctagagctggcaaagagtgaataaagtctacctcttgaaatctgatacacatcaacatagcaaaaggcataaagaagcaactctcactctagcaaagagcatctctgacatttaaatgacaagtgccctattacttttctctctacaataattctacaactatcaagaactccttgcttagaggaattcctcctgaaatattaaagaaaacatcaattatttttcagaaaaagagcttatgaaaataatttccaagatgtttttcaacctatggataaagatggatttgtctttaccctccatattaattggtgatgatcataacattgactagaagatccctaacatgggttattggtagttacagcttctgtctgttagcgaggcaggctggagtcttcctgtgctccttcagggcggctctcagaggaccaggactcacgccaaggaggagggctgatggtctctacccctgggaagctcactttactagagtttgtaattgcaaacacatgcttggaagatgagggagaaacacttagaaagatcccaaaaactcgacagaaaagcagaatggataccaccccctccaggcatgggcggtgctaactggcagagtctcctcttggagcaggctcccccactgcacacccagactccccgtcacatgccttacatttttcaattttttttttatttttaaagatggggtcttgctcagtcactcaagctggagtgcaactgcctgaccatggctcactacagccttgacctcctgggctggagcgatcctcctgctttggcctcccaaagtgctgggaccacaggagtgagcctctgagcctgacctcatcacactcccttgatttcctccctggcacatgggaaaatcccatctcccagccccagagtcggggcccgatgttcgtcccagaataggccctcactgaggaaggcatgaataggtgccagtacctctgccctgtggtgtctgagccctgacctgggagcagggggcagggaggggctgctgagaccaggagacggtgcacaggctgccctgagcgcagctgtgagctcagcaggtgaagtcccatcaggaacaactcctggtggagctgctcaggctggatatatttcttcattggcctgtgatgctgggctaggccttagattacagagaacagagccaggagctgtgacagtggaggacaaagagaagaaagccctcaaggcaggcagagctggcttgagtatagcagctaggggtgtcggaggccacagagggacactgggggccatggaggggcatcggggccacagaggggcattgggggtgctggctcctggagctcagggcgagtccaggtcaaggctcaggggcaaggacagcaaagaggcccccattctgccccatgaagaagctgaggatctgctccatgcactgccaccagatagctggtgaccacttgctgaggtggtggccacaggtaggagtccaggggccacagaggcaggcaggatgggcaagtcctatgcagacaccaagtggccccctctgttcgatgttttccttacacatacaccgcataccttagtgccatccaaaagaactaacttttaatggggaaggggcaattccaacaatgtaggggtgttagcctctcatggaaagcttctatgcacaccacagggtttgaaaatgcaagtgctcataatggccagaaaagagatgcgaaggagcaaagcagcctggcggggtctgcctggaggtcacatgcccccagcacgagtccagcacagccagtgaggaggtttacccaggcccttcgggacaagcggagatttggattcttatgctaaataataacatctaactgatttggtgcttttggttcagttctgttctgagtgctttctatgtatgagctcatttattcctcagcaatcctaggaggtaggtattttcattatcaccttggttttacagatgagaggttaaggaacttgctcaaggtcacggctaagctaatgagtggccaacccaggttctgagactcaggcagtctggctgggagcccggagccccatccctctatgctgtaaggcttctgtattctagtgtcaacttccaagcttgccaaagtcccctgcagggcaacaagacgacctccccrtgggtctggactatrtgaccagctctctgagactcacccgataccgcaggcgaataacctggtgtgcgggcggctcctcytcacgagctgtaatgtcaggctctcatcctggaggtgcccatcagacaccaggaggatgttccgtgaccctcgagcagggtacaataagctaagatatcggagtgttttccagaagtctgtgttccccatggtaggtgtggcagactggaggaaatgaagtgaaagattatgwtctccttgttggatgcagtcaccatttgctgtcatcattgacacatctaaggacagtgtagggatatggtgacaccgaaaatattttctttccctaatttgtgaaacaactaaacttatgtccttttagtttatttcatgtcacacagtaactataayattatcacctcacgcttatttgattttttacagtttccagaggactatgacatctacaggaagaaatgtcccatccaatcagccctggatttgccagcctggctgaggcagctggtcagtctcagcttgctcaattttattattatttcattttatttatttwttttttctttgagatggagtctcgctccattgcccaggctggagtgcagtggcacaatctcggctcactgcaacttctacctcctgtgttcaagcgattctcctgcctcagccttccaagtggctgggattacaggtgtccgtcactacgcctggctaattttttgtattttaagtagagatggggtttcaccatgttggccaggttggtctcgaattcctgacctcaggtgatccacccgccctggcctcccaaagtgctgagattacaggtgtgagacaccacacccagcatttcttttttctttctttcttttttttttttaaacctcaacccttttagataaagctggctgcattttaagagaaaaaaaacaaaggacagaagaaaacttctcaaagctgttaatgctagttgcattagggtgttgggacatgggtgattttttttttctattctttttaatttccaatttttccttaatgagttatcattttaattaatgaaataaagagcccaccaatatacaaaaaccacaggagtaggggtgctctgatggtggcttgagtggcctaagccctggaggtccccttaaagcatggtaggaaaagacccargagatacaggaagcctcttgcactcaccatgatgaactctgctgccryggtattgcttgtgatatgcttaggatacgaaaatagctccttgtaacctgtgtaataagatcagcatgaggtgctgcttccacacgttcacttgcttgagcactaacaaacaataatgttatttcataccatcacggctgttgtaaaggatattatatatttatgtgtgtacctttctttttagaaaactgtttgataattttaacatacaaaagattgtccacaggccaggcacggtggctcatgcctgtaatcccagcactttgggaggccgaggtgggtgtatcacctgaggtcaggagttcaagaccagctctggtcaacagggtgaaaccctgtctctgctaaaaatacaaaaattagctgggtgtggtggtgagcactgtaatctcagccactggggaggctaaggccgggaggcagaggttgcagtgagctgagatcgcaccaccgcactccagcctgggcaacaaagcgagactctgtctcaaaaaaaaaaaaaaaaaattcaccacactatttttctaaatgatacatcatagagcattcaaaccgtggtgctttactatgcaaaatgttgagtcaaattccatgtgcacatgcagatcacttgtgcaaatgtgcagggcattgcaatggcctgagcagcttggcccctggaaggccagtctctgctcacgccctttgcactccccatgcttatccgacctctgtcccagcaacagcagactgtacctctggggaaaaggggctgggtcttctgctggattgcacagaggatgagaatcaataggataagactgtcccctcactccactccacgcacctctcatccctgaggtgctgccttctggtggctgagacgtccctgggccccatctggagggtggtactacctcccttctagcagtgctggcccgatacttcctgagaccattccttatagattttctatgactgcgctgagggcaaatgttttgtccttagacttgggacctcctactcaacagaccargggttttgyatttggttcagttgctaatgacaacagtagcatttatatctcacttactgtgaacaggcacagtttaaaaatcctttacatacattagctcaatcctcctcacagcaacactgtgagttagggacaattatcctcagatcgcagatgaggaaacggaggcaccagaagttcaagtagtgcgcccaaggtgacacacagaacctgtgagtggtacagctggaaccgggayctagggggtccagctccagagctcttgttcttcaatttcatactaggctgcccctcaccacacaggcagggtcgggtacccacarttgtcagctctacagaatgtgattcacatrtaggggaagcacacrcaggaccagggccaaagcgcactcacctgtgccgaactggataatatttactttctgcttctcacccaccaaggacagcgcatgcaaggygatttgcttggcttgcaagaatgtcacaccctccatggaactggagcagtcaagacaaataatcacttcgctctcaytggctaggtcagggaggtcgacatcgagatcgggttgaaagacaagcatgcaagcctgaaaggagaaagaargtgctggactggagcttcttgtcacttcaactgsaaaaggtctacttagaaaactccaaaactttctagtgaggtaaactaatgctataaaaacagaaagaataagatgtaattaacaacaagatggcctactaggagttccagtcaaaagtagaatgttagaactgggagtttccaacttctgacataaacttctgagaggtcaagaattagtatctgaaaaatcatatagcatcaacattatggaacaaatatatatatatatatatatatatatcacactattctaagaggaatatacatgccattgtgattactaaaatacacacacataccttttgttctattaattaaccaatatttaactactatcatgtaagtttcctttttttttttttttttttttgagacagggtctccctctgttgtccaggctggtatgcagtggcacgatcacagctcagttcaacctcaacctcctggactcaagtgatcgccctgtcttagcctcctgagaagctgaaaccacaggtgtgyatgaccacacctggctaattttttttcttaattttttacagagacgaggtctcactatgtttcccaggctggtttcaaactcctgagctcaagcaatccatctgccttggcctctcaaagtgctgggattacaggtgtgagccaccacacccagcctaagtttctatttttattttaacttaagaagagactctttgtcacagccacacaaaatgatcttattaccaaccacaaataactgcttatttgtttttccagtatcagtattttaaaactataacaagttatagagaatacccaatgtaatgtctgatggcacatgttcttttggtggagcttaaggtaaaaatgcgaatttgtacaggcaaatcatccacataagggttttggatgaaacgtcagaagtttggcatgcttgatatcataaatatttttagttgcagaatcttgagatgtgagagttcattttgtaatgctagtttttcaggacaatcaataatttgcaagtttaaycagcttattctgaaacattttttcaatagygtctcctatgtctaagtaaaaaggagtatacctcgctttctttttctggatgtttttcaacccacattcttgggagataggcagcagacaaaccgatgtggagagaaaatccactgctgtctaaggagctgccttccatggtgctaatgacagctttgcagtctgtgcgctgcaaaacaaacacygcracaacaaggtgagtaatggagtaacaccatattagcagtctgcacttacctgtcatggagcaaacccttgcatagcttacataactctattaagaatcaacaaagtagtggtaaattccaaaataatgaaatgtaggccgggtgcagtggctcacacctgtaatctcagcactttgagacgccgaggtgggtggagtttgaggccagcctggccaacatggtgaaaccctgtctctactaaaaatacaaaaaattagctgggcgtaatggtgggcacctgtactcccagctagtcaggaggctgaggcaggagaatcgcttgaacccaggaggtaaaggttgcagtgagccaagatcgcgccactgcactccagcctgggtaacaacagggaaactctgtctcaaaacaaaaacaaaacaaaacaaaacaaaaaaaacaaaataacaaaatgtaggttttagaagaccatgagcatatcagtcacccttctgcaatcctaaggttgattcacacggtcaaataagtgtgagacagtctcaaaccctggatccaaagattatagatctacccattcagttagacttatctgggtatagcagacggcacatcagataattaaaaccgagaagactaaaatagaaaattcaacagaaatcttagaatcataacttatttgtatattatattttcatgaatataaaaaagctgttgaaaatgtaaataagctttacaacaacaaaggcaaaggcatgtgctagagtgtcacatgaccacaaagtctctccactcctgtctgcgtgcycctttgcaatgtgacttttgaagttcctcctgccacgaggcagcagctatatttccacccttgaaactggagttggccaaaggacttgctgtggccaatgatatgttggcagatgagatacaagcaggggcgtgaaaagtgtccatgcaacgggcctggcactctcttgttgctactgaggactcctccaccactatgtagtggctcacgcctgtaatcccaacactttgggaggccaaggcaggcagatcacctgaggtcaggagtttgagaccagcctggccaacatgggaaaccccgtctctactaaaaatagaaaatttagctgggcgtggtggcaggcacctgtagttccagctactcaggaggctgaggcatgagaatcgtttgaacccaggaggtggagtttgcagtgggccatgatcccaccactgcactccaacctgggaaacagagtaagactctgtctcaaaaaaaaaaaaaaaagaaaaaagaaaaaaagaaaggcactgcagaaaggcacaagagaggaacttttttttaatacaataaaatttctcagaactaaagaccaccagttacatacaatgaatgaaaatcatactgttatgaaatttcagaataccagagataaagagaaggtctgaagttcctgcagaattctaaaaaggaaaataggctgggtgtggtagctcacacctgtcattctagcacttcgggaagccagagcaaaaaggatcccttgaacccaagagtttgagaaaagcctgggcaacatggtgagaccctgtctctacaattttttttttttttttttgagatggagtctcgctctgacgcccaggctggagtgcagtggcgcaatctcagctcactgcaagctccgcctcctgggttcacgccattctcctgcctcagcctcccgagtagctgggaccacaggtgcccaccaccacacccggctaattttttgtatttttagtggagacgaggtttcaccatgttagccaggatggtctcgatctcctgacctcgtgatccacccacctcagcctcccaaagtgctgggattacaggcatgagccaccgcactcagccaagttttttttttttttaattagccaggtgtgctggcacaggcctgtagccctagctactcaggagcctgaagcaggagggttgtttgatccaaggaggtcaaggatgaagtgagccatgactgcaccactgtactctagtctgggtgacagagcaagaccctgtctcaaaaaataaaacaaaacaaacaaaaaaaactcatcataatattatacatttcttggctcagtggtaaacatcatttacatgataatcactgactattgtgaaacaggtcttttggaatgaaggggagaggaaaagtagtgagttaggtgggtggagggggcaagagctacacgtccaacttccaaaacaggaagtcaaaagataatttctgaaacaggcgaaatcaagaaaaagcattaaaaattaatatttaaaaattggaggcaaaatcaaagaaacagctcaaatagtccaaatgattcactgtctctggaaactggtctggggagaatcaggggcaggagtagtgcttcttgttagaagttttgtcagcattatttcacttttcaaccacgtgcatacattgctttgataagataaaagtagtgttaaaataacagctcttaagaaatcaaagatgcactaaccttttgtttcagttcatgwgtatcactgaaaatgaattcaatcacrtacggcatctcaatagacatagtcaaagagaagctagcaaaaatgaagagaaagttgtcttastctacgatcttaaatttctatctgaaattatttcaaacaattctaaatggaaatttaaaccagaaaaccaatatccattgaaytgacaggttttatattttasgtactaacctttgctttgttcctatttcttttatacaaatcttctctactgtatcctgttaaaagaaaaatacattygtataactaagcatatattaagtttcacaatgagactaaagtgaatgtaatyttggcaaggccacaactgtcagcaagacagctggtttcactttcaagcagtgaaacacagaaagtttgctcatggaatgacaggaacttctaaaatacaactcaccattttgacagagattttaaactctacatatgtctgtgtgtatacacacacacrcacacacacacacacacacattttatacatgtgctgtacatacaaagtaggaagtttggagggatataccgaagtattaaccattaactctgggcaatgggataaaggatggttttaattttcttattttggcttatttgtattctctatgcttatctagttcttcatgatgaacttgcactacagatataacattttttgagtgattaagcagaataaaaatatscttattgatcatatctgtaacttttattcttttcattttatacacataatgtatctaaayrcatgtcagtaaaattaactttatgcctaaaagattattttacatgtttttctccccaggcataaattcctccacagccctccaccactccccctccactgctgccaaaatgcttcttcaaatcttatgcgtacaaacctgaaggttttcattcaaagccttgtcctgttgccagggtgctacggtggcgggcatgaaaaagacaccaacagtgcccaggatgctgagttctgtgatgtaggtaatttttataagaaccttagccttagggggtaagtttccaacacttacagtaaaaacgtcctgaaacagaaacatatgacttagcttccaacttgaaarcatacccattatatgccagctaactccacgtacttcttaagcaacytgaatgacaacctgccaaattcttyctcagaaaacagtaataaaacctaaaagacacattggtggggctaacggagaatcctggagccattcaccagtggtgggaacagggtgatgtccgtggcaggcagatggagaggggcccccttggcagcggaactgggaagaggcactcatggactctgccccagggggctctcatgtgtgagctctctgcacacgtgggctctgctgcatgggtgggctctgctgcacgggtgggctctgctgcatgggtgggctctgctgcacagatggcctccacaaagccctttcttgaagaccctccctgacctccatggcacccaacaccacttttgccagcagctgtagaaccagggcagttttttctaagcttggcccttgcttaattattttaccctatggtaatttctcatgttatttttatttttatttattcattatttagagataggatcttgctccgtcatccaggctggagggcagtggtgcagtcacagcttaatgtagccttgaaaccccaggtctaagccatcctcttaagtagatgggactacaggcacgcaccaccatgcctggctkatttttaaatatttttgtacagatggggttgcccaggctggtctcaaactccaggcctcaagtgactcttccaccttctgctcccaaagtgctgggattacaggtgtgagctaccacacccagcctatcatgttatttttttactaaaaagtctttagctttcttttaaagggatgttgataatagctatataaggtggcaaccccatgactagctagggcagaaaaaagaggctagatacatttttttctgataactaygcagagatcctctcaacatccccaactatgttcaccattctagttgaccaccccatcatgaaaattttgtatatttagattaggattaatttaggcttaaaggttaaattattacttttgacatcaaagacatccatttacaggatggaaacagacaataaagagatgattattaaatacttaatagtgctagcccttaaaagaaatgtatgtataaacacctggggttcatttgagacactgccacttaatagagtgggattgcagttctgtttctgggtaggatataggtggatgcagaaaatgtcacttctgttataacacaccaggcaatctacaaaatcataacttgttttgaactcatcaaycaagcgaactgaattccaaagaggggacagatgggacacaggatctgtgtgaactcctcccggctgagagtgggtaagcttactggtttagaagaattgggagctcctgacccaaggggagtttgcattctctygcaggcgtttccccatatccccacagccttccactgggcccactggaaaggctgagcagggcaggagaccaagrggagcacctctcmgtggagcaggtgtgtgggaggtgctggggccacttccctggatcctttccccacatgaagcaaaagcctccagctgctgggggaagggcagcwaactctcacttccagagctgcggggaaggggcagaagtaaaccagggatcagaagccttcctttctagccctgtgcccaggtaaagctccactgctttagagagaaacagccacctccccatggggcaggggatgacaccctcctaggcccaggatcctgcactagtacaaagcaggggttrctacaactggaggaaaggcaggaaaccatctcccaaacaactcttaacagacacaaggcagaatttggctgccacyaagataggacaatgaacagaagtgctaattagttcccatcctaaggtccaggactgcaggccctgcctaagactgaggctgaaccagaagaatgcccctgccccaccaggagcctagtacagcacatcaagcaacagcagcctagcactgcgggaggggaagagttgctgtaatcacctctgtcggacagtgtgcagagtctgctgaaagctgggggcagagaatgaacctcagtgagaattgttccggatccagaacccaagaggcacaggtagtggcagtccaccactggaggaatttgagacggagagtaataataacaacagagagtaatgataacaacagcagaactcaaactcaactcttcaacccctacactaacctgaaagaacaggagttgccacttctgggcataaatgtcatttatttcagtctctcttcttcttttacacacaatgtccaacattyaatcacaaattccaaaatatacacatttttaaaaagcaaggaaaaaatgacccaatgtcaagataaagcaattaacaggcagattcagagatgaccatgacactgcaacagacaggactatgattaatatatgaaaagacatacagaaaaggtgaggaatacatatgaatagatggaacctttcattagagagactgaattatattttaagtgtcaaaaatgctagaaacaaacacattatcaaagttgaagaatttgacaagcctatcagctgactgacaatagctgagaaaagaatgaatgaacttgaagctaggtcaatagaaattatccaaaataaaatgcaacaagaaatgaaagtgaaaacatagagctccaaaagctgtgctgcaatatcaaatacggtctaatgtatatgtattgaagtctcagaaggagaaagagagagaatgagggagaagaaatatttcaatagataaagatcaagactgtcccaaaatgaatgtgagacaatccaaactcagagaactccaagcaaaataagcaataaatttaaaaaataacataaacacatcatagtcaaaccactgaaaaccaaagataaagagaatcttgaagatagcttgacaaaaaaagacaccttcacatatagatgaacaacacaagaattagagctgacttctgctcagaaaccatataagccagaagacaatgmagttaacatatttaaaatgctgaaaggaaaacaaataaactgtcacctagaatcccatactcagcaaaaaatatctttcaaaaatgaaggtgaaagactttgttagataaaagaggaatgcactcyttgctagcacacttgygctagaaaaagaaaataaagaaaactcttcaagcagaaggaagatttctttgtatctatagaaagaaatgaagagcaccagaaacggtaaaaatgtgaataaatgtagagacatttccccttatttttaattgctttaaaatatagttgatcatcacataaacagaactaaagacaaaagccacatgattatctcaatagacacagaaaaggcctttaatacaattcaacattgctttatgttaaaaactctcagtaaactagttattgatggaacatatttcaaaataataagagccattaatgacaaacccacatccaatatcatactgaatgggcaaaagctggaagcattccccttgaaaaccagcacaagacaaggatgccctctctcaccactcctattcaatatagtattggaagttccggccagggcactcagtcaagataaagaaataaaggttatttgaataggaagagaggaagtcaaactacctctgtttgcagatgacaagatcctatatctagaaaaccccatcgtctcagcccaaaagcctcttaagctgataagctacttcagcaaaatctcaggatacaaaataaatgtgcaaaagtcacaagcattcctatacaccaacaacagacaagcagagagccaaatcatgaatgaactcccattcacaattgctacaaagagaataaaatacataggaatacagctagcaagggaaktgaaggacctcttcaaggagaactataaaccactgctcaaggaaatcagagaggacacgaacaaatggaaaaacattccatgctcatggataggaagaatcaatatcgtgaaaatgcccatactgcccaaagtaatgtatagcttcaatgctactcctattaaactaccattgacattcttcacagaattagaaaaaactaggttaaaattcatatggaaccaaaaaagagcctgtagagccaagacaatcctaagcaaaaagaacaaagctggaggcatcacactaccagacttcacactrtactacaaggctacagtaatcaaaacagcatggtactggtacaaaaatagacacatagaccaatggaacagaatagagatctcagaagtaacaccacacatctacaactgtctgatcttcaacaaacctgacaaaaacaagcaatggggaaaagattccctatttaatgaatggtgctgggaaaactggctagccatatgcagaaaattaaaactggaccccttccttaaacttacacaaaaaataactcgatacggactaaagacttaaatataaaaccaaaaactataaaaactctagaagaaaatctaggcaataccattcaggacataggcacrgtcaaagattttatgaggaaaacatcaaaaattgcagcaaaagcaaaaattgacaaatgggatctaattaaactaaagagcttctgcacagcaaaagaaactatcagcagagcgaccagacaacctagagaatgagagaaaatttttgcaatctatccatctgatgaaggtctaatatccagaatctacaaggaacttaaacaaatttacaagaaaaaaaaaccccattaaaaagtgggcaaaggacatgaacagacacttctcaaaagaagacatttatgtggcaaaaaaatatgaaaaaaagctaaacatcaccgatyattagagaaatgcaaatcaaaaccacgatgagacaccatctcatgccagtcagaatggcgatrgttaaaaaatcaagaaacaacagattctggcaaggctgtggagaaataggaatgcttttactctgttggtgggagtgtaaattagttcaaccattgtggaagacagtgtgggtctycctcaaagacctagaaccagaaataccatttgacccaccaatcccattactgggtatatacccaaaggaatataaatcattccattataaagatacatgcatgtgtatgttcrttgcagcactattcacaatagcaaagacatggaatcaatccaaatgcccatcaatgatagactggataaagaaaatgtggtacatatgtaccatggaataccatgmagaccatgtcctttgcagggacatgaatgaagctggaagccattatcctcacaaactaacacaggaacagaaaactgaacacaggatgttcttacttacasgtgggagctgaacaatgagaacacatggacacagggagggaaacaacatacactggggcctgtagcggaggcagggagagggagagcatcaggataaatagctaatgcatgtggggcttaatatctgggtgatgggttgataggtgcagcaaaccaccatggcacacatttgcctatgtaacaaacctgcatgtcttgcacatgtatcccagaactttaaaaaaaaaaagatagttgaatatataacaacacattgtagaatttataatatatgaagaaataaaacacacgacaacaatatcacaaaggatatgggaaaaaagaaacgaacgtatactggttgtaatgtaatgtattctggttgtaaggttcttacatatgaagtagtataatattgtaggctgtatgtggtaagttacagatgtatrtagtagtaaaccctaaagcagtgykgaccaatgtaactttctatgatgataaaaatgctctacatatgcactaagtaataagatagccactggccacataaaacattttattttatatttaaatgtaaatatacacatgtaattagtggctaccatatttaacacatatttaacatgtggctttagagcaacaatcaaaacttaatttttttattttttgagacagggtctcgctttgttgcccaggctgtgcagtggcgccattatggctcattgcagcctccacctctcaggctcaagtgatcctcccaactcagcccctcaagtagcygggactacaggcatgcatcaccacacccagctaatwtttgtattttttgtagatctggggtttcaccatgttgcccaaggggtcttgaactcctgggctcaggtgatccatctatctcagcctcccaaagtgttaggattacaggtatgagctaccacacctggccaacaatcaaaactttttaagagagagagaactggctgggcgcagtggctcacgtctgtaatctcagcactttgggaggcagaggcaggagaatcacttgaggttagcggtttgagaccagcctggccaacatggtgaaaccccatctctactaaaaatacaaaaattagctgggtgtggtggtatgtgcctttagtcctagctacttgggaggctggggcaggagaatcgctcaaactgggaggcagaggttaggttgcagtgagccaaaatcacgccactgcactccagcctgggcaacagtgagactctgtctcaaaaaaaaaaaaaaaaaagataaaattaataagccaataatggagatacaatggaatcatttaaaaaacaatacaagagaaagcaggaaaagcgagggaaaggaacaaagaacaaatggtacaaatagaaaacaactagcaagatggtagatataaatctgaccagatcagtaattgtattaaataaaaatgacctaaacaatacaaagtgcagaaactcmcagattggataaagcagcaaaattcaacagtaygctatctaagtagtatagggttatagtgacaagtcagtcagtctagatgttttgaaaaggagaaaaccatcaaatggtcacataaattgaagtcttggaaacactgccatttaatctggcaatgaggaggacataagtcrtcctaggctgggcactgtcttcatccttggtttcggcaccacaattttctctttattgtaccactaactatccttttctgttacttccacacttaaatattggggattacgagctagacctctatctttacaaacagtatattaagagttataagacaaatatgtccaggttgccatgggaaaatgaagccatgggtctttccgggggaaggcaggaaaagcttagatggagggattcctaagctaagacttgtttgtttgtttagagacagaatcttgctctgttgcccaggttggtgtgtagtggtattatcagagctcactgcagcctcgaactcctgggctcaagtgatcctcccgccttggcctccaaaagtgctgggattacaggtatgagccactgcacctggtatatatggcatttatataacaacgcatgaataccatatattatgatatgagaacattatagtcacaagatgtcaatacattctgggagacctgaaggcttgggttagcaatagttctgatcagactttacccataggtaataccttytgtgaaggctgttttcttgtggaccmtattcctagggaaatatgtargtattaaggaggaaacatttaccaacacacgtaggaggataacctgataatattaagtggcagcctctcaaatgaaccccaggcttctatacatacagtttggccatayatagagccagcattcttaactgttcaataatcacctcttcattacttattcccatcctrcaggtggatatcttagatgtcaagagcaataatttacccctttgatctatattaatcttgaatgtgcccctagccccagcaaacattaaattttcaaaacaccatggccaygtgtcaccctcagaggcgatactcaaacatatggccccatctgcaagaataactaaaatacctgcactagagttagacgctgactacacacaatctagcacctgccagaggcctcgtgaaaacacctggtatttaaggaaagtagtctagtggacctgccagctattccctcttccacgctgtccacgtcacgtccctgctaaagctaatcacctaaaagcacaggagctggcccaaggaggacccggcagaaatgcctccctgctttatgattggaccatctgctaggtgagcttacttcaggaaaattgtaaatatatcacactcctttttttttttttttttttttgagatggagtttcgctcttgttgcccaggctggagtgcaatggcacaattttggctcactgcaacctctgccccccaggttcaagcgattctcctgctgcagcctctccagtagctgggattacaggtacctgccaccatgcccagctaatttttgtacttttagtaagagggggtttcaccatgttggccaggctggtctcaaattcctgacctcaggtgatmtgcccacctcagcctcccaaagtgctgggattacaggcataagycattgcgcccagccagtatatcacactcttatcagaagatgaaagttatatacctcaaatgttatctttttgtctgtcattccttctgggaaactcagttcccaatgacaggcctagctcttcttgtttgtctggaactactgayrctgtttcctcctttgttaagtcaaatgggtctgactggcgtggcttccccttactyagascaagtggaactctggggcctacaacagtgcaaattatcttagcctctagcatgaaattcgtatttcatatcttgttctaactctctttccctctccwgtatgcatgcggcatgcacaccaagccataccggagcatcctgactcatcaggtaagcgccatggccctgggtcacggcttctaggtactcttgctgggcttcttccttctctttaatctggaaaagatgagttttaaatcattccttacatgaagagtgacttcaggctttaatgaagaaaacaacatcaatgtttactaaaacccaggcaaaaactaaaaactgagtctaagrtgaatggaaacttaaatraagtgatcatcgaaatatacttatctgataagaacttgaaccagaaaaggccaactaaagagaagtctctttcagttgggatcaaaatatttcagaatcaatagtgaaaaaaatttttctggttgggagtttatgtggaacaaaacataataattactttaaatttgggaaattgtagtttctaattgtaactgtggactaatccttacaataaacaaagaattaatcaactgttgtttcttttctttttttttagaaagttacaatagctttcatttcagctcgaacccctgacctcaagtgatccacctgcctcagcctcctgaagtgctgggattacagggatgagccactgcacccggccctctttaacttttcatactgaaatcactcttacggtgccaaggcaaagaatgtgcaagacactgaagatgaagactggacagatgggggtagaaacccttcatcacggagggatgcttgagggaggctcactgygcaagaactgattcytcaaagaatattctcgttttatgataaggctgctactcaaccttgtagccatggggactccaaaaacaaaggttctgggaaatggaagctgactttgaaagccgagagcgggcacgatgcatcttcttgccttacctctccaactatgtgcttcccattgatgaaggcttcgaagccacacacagcrgccttgtcatccaaaggaaagatatattttgcctcaatgggcacgtgacttttatttgtgtatgtctgaaaaacaatgacctgaagaagaaaaaaaatccatacaattgatgagaccacatggactacatttgcaggaacaaggacgaacgaaaatgattttgcatatttatttgaatttccttgaatttgtatcacgtccctcaaattcccaaccctggcttcacttctgcaatggagagcccatgtcatgtgataaaatgcaccagtcccacggttaggtggttcattcatgtctgactggaatagaagccacctgaagtcttaccaacactgacttagcagacgcaatatagctcttgttaagacagctggaaaattgcccctttcgttttgtgggctttgatgcctccttcgtgccatgttggctggaaaygattccagaatagtccttctatcctatcagctctcaggacttggcctttcctcctggggacctctctgtggctttccccctctctacacagccctcatctagctcctcatctctgtgtgcgttggttcttccagaatcaagtcttctccactactctctgttgtctctattatctaattaatctttccaacagactgttttcatcactccctcactcaggaaaaggcgggaggctttaaatatttgaaaattaagaaaaaactcctcagacatacaataaacagtaagattttaaacatgtgacaataataaggcaaaaatatttaatgatctgtaatcaataatccagggaagacaccaaaatgaaaaatttaaaaaaaaaatctaacttatttgaaaacattgtccacacctggatttgctgcaagcttggctgcccctagggtgtgtagggtgccaggcaaaatttttcaaggagtccttgttaatatgagcaatttgagtctccccaaatcagcaggtcagcaccgtcctrgagacagaatctcttgccatcctgcaaatgaacaccttgctggccagtgggtaggattcctggaatcccggtctggccagccacccaagaggaggcaaacgtgcrtcctggagtttctcagcgatctgggctatgctgcctgcartgactgcttagagtgtgcctggtgaggaggcaccaggactggggcccacctagtactgactggggggacgtcagacactgtccccttgacygtgcacggaactccttctcatcctgtcttggatttcctcagttttacgaaaccctcaaaggcatgtatgcttgccctgagtttgatgatcaggatcactatctaattgtacttggtgtagactaatgtttcttcctactcagtagccttcctgcctgttctagttagcaggcccgcctttgcgcaggagtccccagacatcaggcckgtggcagctgcactctctttkcatatcacactgtgtggctgggcactcacaaaggtcaataattttagataacgayaataaaagtatttttaccaggccttagaacagaaactaatayaatgtaacaaattttgacatcttaattttcttccattagataaaaccatgatgtaactaagcttaacatcatcaatttattccaagaagggtcaaaatgtatgagccatgcacatataagaatctacaccccagcctctgcttggatactcaagctaaatctacagtctggctgtttcatcawaaaatgagtgagaaattcactgctaaatcgagttattttggggcaaacttccccagggaacaggcctcttcgggtttgaaatatcaaatggtacaagtcatctaatcccaagtaaggcatggaggacacacgcctctccctgtaacctcgtcataatttgttktgcacacaaaaacaatgccctaagtcctttatatttattagattgaatagccactacactgatgggcagatattattatttccattttacacatgaggaaaacgaggcaaaagagttaagtaactttcccaaactcacagcactagaaagaataaacaagaattcaaagctaagccttacaaactcyggatcctttgctttgtatgatctaccatgctgcactatggtgtactggttaagaatctggacgctggaatcagaatgatctgagttcaaatttgggctttatcatattgtttgtctctgggcctcagcttcttcttccaaacaatgggcataattatagcacttggcatggagtctgagagaattaagtactgcatgtggaaaactcggctgagggcctgactcttaggaaatggtaaccattatgtttacagatcctaagtggtgccaaagggattggtggaaatggaacatgtcccatgagcccacagctgggtcttttcaaagtctatgackttgctctgagctgccttgaggatgtgygtatgggtcagagtgggcccaggggtggaggtcagctatatccaaactgctcttctcacccaacgccccgtctccccagattaaggtgatcactgaaatggaactaattttcctctacagggatcagaacatcatggcactgtacttgaacrttcttaatctcctmaaaggcctttatggttgttcaatgcaatcttcagagtcagaagctgatcatgaggccaaatcttagcaaaccaattcaattttagaaaaccaaaaacttaactttccaagctctaccactgcatctggccacttggcacccctgaaacgctgccttccatcctgtgactgtggatgatgaacctgctgcgagctcctggctgcggccccagcaccygcattagataaccctcctgtgatgcttgtcttttgctttgaccagttcttactcacttggtatttaatgctctttctgagcttcagtgcagataatttaataaggtgggattttctccttctctttcaacaccctgagttttttttttttttttttttttgagacagggtctcactctatcacccaggttggagtgcagtggtgcgatcttggctcattgcaacctctgcctcctccaacctgccctcctgtgactttgcccattctagtaatggcaagccatcctcccatctcgacctcccaagtagatgggactacaggtgtacgccactgcgctcagccaatttttgtagagatggggtttctccatgttccccaggctggtctggaactcctgagctgaagcaatcctcctrcctcagcctccctcccaacgtcctgggattacaggcatgaaccaccgcaccggccaccaccctggtatttatgatagcaaaatgtgtatattttagtagctaacaaaggtttgggagaacagtagaattcatctctctctgggaagaaagtgctttgagcactgcctggcacaacataagggcaatatacatgtttgttacawagaaatgttaaataaataagggcataakaaagttctaaattgagtctttggagatatttcgataaacgtaaaattcagaacagtttaccmggaaagtcttttcaacaatgtttcctatttatgcaataaaacatagagaagggtatagagaaggaagcagttccagcaattcccctctcccaggtcgccaggtttccctcctgcgctgactcccacacatgctgttgtttcttgcatcttaaaatgagaaagaaaatactcaaccccacttctcttcagctgctgtctcatcttctctcctctgtctcccagttcttcctcccattccctcttgaactcactctgatcagcctttcacccccaccacaccatcaaaaggcaaaggtcaccaacaatctcattgctaaatccagtgatcagggctgggttgttattcatgagacccaccagcctcccctccctgttcagctgtcctcgtgtgtctccacagccgctccctcctggtctctgtggctgactcagcctcctcccctacgtctccacgttggcctctgtgctctactgattctctgggtgtttaatctgggctcatgactttaaacactatgtgaatgctgctgactccccacttataagtccaactkgggtctcctccctggtcctatgtagtcacaagacctacgtggccaaagataaactcctgatggccccyaacctgccctcctgtgactttgaccattctagtaagtgcaaacatgatccttctagttattcagggcaaacactctgctgtcttcctgggccgctgtctttctcttgtgtcccgtccccaccagcaaatctgattggctctgctctcaggccttggcggactccatcacttcctacacccccactgcaaaccttcttctccacatcaccaggtcccttaactgaattgtcaatcgtctcctctatgtgatgtgacgttgggccygctgtgtccccttcagggctgagactgctaggagtgtcacctgtggggcgcctccccaggaaccrtcctcagccaaagacaaactgccttagccaaggttctgacccctcccyggagcagcccacatcccaggactggccccagtggggctacaaagcccggcccccttgccttgattcagaccttctctcaaggaccactctggcccagagcttcccccaagatcatctgaggactctgttgtctcctcggccacgtcctgcctccctcactccctcacaggtgcggctccygcaggcacagtcccacaggcttcctgaaaacaaattccatccagagtctgctttctagggaacttgacctaacatttctcccactgggcctcttcctactgttcccaacatggtggccagagtgagctggttaaaacaggtctgttcatgtcattcctctgccaaacatctagaagcttccatttcactcagagtcaaggacagcatgacctgtgtgctgatgtgagagcccctcacctctctgactcagtccccatgcactctcccctttccaccccactgcagccacagtgcatctccttggcgcgcctgggccagatcagcctccttcctacctctgagccttggcatgtgatgttcccgctgcctggaataagcatcccctgacgtccacacagtttagcccccacttccttcaggtctgtatgcagatgtcaccttctcagggaggcctccatggccattctgtttacaggttcaaagcccctgtctttcacagctcctatctgtgaaagcagctcctcctgctttcctttttctctttagcacctgtcaccacctracatgttatgtgtttcactctttcatcatgattattgcctactcccccacacagtgtgtgctccacaagggcagagcttttgtattgtgcactgctggatgctcagagcctagctagtccctggcrtggagtgctcagtgaatatctcttgaataaaatacattttagaaatctatctattcccttcagttcatgcaactgcaatcaaattctcatgtatggtttacatccatgtagtttaagtgtcataaagccacagacaacatacctgggctacagtgtctatgattctccctttgatgtggacatcctccagaggaaccaagttcccagaggcatcctggaggccggccttggtgctgctggaagttttggcatctggtaactggtaatctaaacgttaaaaatgttactattagctttcaaaaccatccctgtctatttttgttatcttgatctttattccttcttcaagccttcatgcattttattttagggaaaatgggcaaatagcattttatgattttcaatagccaattctgaaaagcaagtgaacccacatgagaaaaatgagaggtgccttctgcctttttttttttgagatagcatgtcactctgtcacccaagtgggagtgcagtggcacaatctctgctcacagtagacccctcctctctggctcaggtgatcctcctgtctcagcctcccgagtagctgggactataggcatgcaccacaatgcccagctaattttttggtattttttgtagagatgaggtttagccatgttgtccaggctggtcttgaactcctggactcaagggatctacctgccttgacctcccaaagtgctgggactatgggcgtgagacactacacctggcctgcctttttttttgttttttaaagacccttcagcttaaatttttttttcttcttttcttttttttttctttggtagagattggagtttcactatgttgcccaggctggttttgaactcctgtgctcaagtaatcctcctgccttagcctctcgagtagctgcgactacagacatgtgctcttctgcctttttaatgtagagactgtggggtgtcctcctgaaaacacagcattacttgacatacatttaaacatacacacaaatacacagaggtcttcagactgtctgaagtgtggctgaagcctgaatccaggtgtctgcattccctggcttatagtgtggaagggctcggtcactattatttatggtgccacacaagcattttgggatggcatcaaacaacgtagattttcaatccaaggaagactgaatcaactcctatggcagcatattgaaaaatgtacacatcctattctaagtggcacaaacatacagataaggttaggaaatataaatacatattgtcttgccagatatttcacttaatgactcccagagaaaaaactggagtcacccctgaacacacatgaactcatgcgtttctgacaaaaaataatttgagcatggtcaaaaatgttaatgtgttcttacagtcctactaattaatactgtaattgtttggcctcatgatactctgagaagtgaatatcctcttgtatgctcgcactactatggctaacacacgcaccacacatggcaatttactcagtgccttcaatttccccttcagcccttacagcaattctgtcatgcgggtactgctctcattcccatcggagagaaggtggagcgcaaaaggtcatgcagtttcaaaactgcaaggtggcagggcgacactcaaaccctgggcttcctggctctacagcggctctgctgtctgctctccccaccccattacactttctgcaccatgacatcttagcaaggttccacaggttttagccttggctattcctgaagcgaataagctcaacttcagtgtgttaatgaagtcacatggaatttctcaatcatcctagttgttatgtacgcaagataaaaaaggaaatgaggctggccatggtggctcatatctgtaatcccagcattttgggataccaaggcaggaggatcgcttaatgccaggaatttcaggccagcctaggcaacatagtgagaatttgtctctaaaaaaaaaagtcacggatggtagtcctagctactcaggaggctgagtcaggaggatcatttgaaacccaggagtttgaggctgcagtgcactttgatcacacactgtactccagcctgggggacagagtgagaccctgtctcaaaaaaaaaagaaatatatatattttaaaattaagtgctttattttgatactaggcagaggggtttgactgatgttaacactgagagaaatttgtgggaaacaattttgagattgaaaggaaacgaaatacttatggatgaggtcatagatataacaaatgcaaatatacattccattgaaaatataacatttgaggtctataaatataataacataaaacagcattcaagaaaattgtcctaccttcaacctttgaaaaatttgaaaactcaggtctgtattcctctaattcagtatgatcactaggatgaaagtcctttatctgatctccaggcatggaaaatttaataatatatttcattttaacctgattggttttatagacaacaaattcatcatcctagagcaaacagaaatcagtaggtgattaacaacagaagcaacaaaaaacctgtattggcagatgttttcataaaagcatgtttgctaatttagaaaatgttgaattaattcatgcagtaaatatataacaattatttaaacttaagcatatttaatgaaaataggagcaaaaaactaaggcctttctttgagcattcaagaccctctttgcttcttccttgaaataaaaatacctcaaagtctgtggtgacagaggctgtttgygaaactccatgcacactgtcgtagcctggtggtgcttcagttaaggaaaagtccttctcatgtaagtccatacactttccgagggctacgtcacaaatgagcaggagtctggtgccatctgtctctcccrggtgtgagtacttgatacttgtactacatgcgaaaggaaataaacacatatttacagcttagagtgacttgtcaataacatactattgaaaagactttcctggtaaactgttctaaattttcctattattgaaatatctccaaagactcaatttagaactttattatgcacttatttatttaatatttcttctttttttttagacagaattttgctctgttactcaggctagrgtgcagtggcatgatcatagcttattgcagtctccaactcctgggctcaactgatcctcctgcctcagcctcctgagtagctgggactatagatgtgcaccacacctagctaacttttaaaattttctgctaagatggggtctcactatgtttcccaggctggtctcgaactcctgggctcaagtgatcctccctcctcagcctcccaaagtgctgggattacaggcatgagcaaccatgcctggcctatttcgcatttctatgtgacaaatatgtatactgcccttatgttgtgctaggcagtgctcaaagcactttgtttccagagagaaatgaattctactgttctcctaaatctytgttagctactaaaatatacacattttactatcataaataccagggtggtaaagagaaggaaaaatcaccaccttattaattaggaaaaagtagatttaattctctgcactaaagctcagaaaggaataagaaccgtgggtaccaagtgagtaagaactggtcaaagggaaagacaagctctcacaaagcctcctgaaaggaaaaacaaacatttcaaattatatccaaatgagaaatgttgttttatctttctttgggaatcagcagctttaataaggcaactcttgctattaggagcacagactaggacacacctttggacacaacattttggagacgcatctctattttttaaagattaagttcaaaatgccgaagtatggccagacgacccttctttgtttcacctactgaaaaaaaaaatcagttcccccattccttctaaaatcctctcccctttggagggctcttttcctgcaacttacaagcatgctttcttccttctcattaaaccccactctggacttctccctggagctctctctattccttcctatctcaccacgttctggcaaagggggcccagctgggctcctgagtctggtggggacgtggagaacctttatgtctagctcagggattgtaaacacaccaatcagcaccctgtgtctagctcagggtttgtgagtgcaccaatcgacactctgtatctagctactctggtggggccttggagaacctttgtgtggacactctgtgtctagctaatctggtggggaggtggagaacctttgtgtctagctcagggattgtaaacgcaccaatcagcgccctgtcaaaacagaccaccctactctaccaatcagcaggatgtgggtggtgccagataagagaataaaagcaggctgccccagccagcagtggcaacccgctctggtcctcttccgcactgtggaagctttgttctttcgctctttgcaataaatcttgctactgctcactctttgggtccacactgcctctatgagctgtaacactcaccacgaaggtctgcagcttcactcctgaagcccgcgagaccacgagcccaatgggaggaacgaacaactccagatgcgccgccttaagagctgtaacactcactgcgaaggtctgcagcttcactcctgagccagcgagaccacgaacccaccagaaggaagaaactccgaacacatctgaacatcagaaggaacaaactctggacacgccgcctttaggaactgtaacactcaccgcgagggtccgcggcttcattcttgaagtcagtgagaccaagaacccaccaattctggatgcattactattgcaattgttttgggctgcaacaatctgtgcccatacaaggtggtgggcttggcaaatgttttgtgtgttctgactgctccactgaccagtggttccctcatctctctcctccttctctggcctccctattccctgagatacaacaatattgaaattaggccaattaataataaccctacagcggcctctaagtgttcaagtgaaagaaagggttgtacatctttcactttaaattaaaagctagaaatgattaggcttggtgaggaaggcatgttgaaaaccaagacaggctgaaagctaggcctcttgtggcagttatccaagtggtgaatgtaaagaaacaatttttgaaggaaattaaaagtgctgctccagtgaacataggaatgataacaaagcaaaacagccttattgctgatatgaagaaaatgttaatggtctggatagaagatcaaaccagccacagcattctcttaagccaaagcctaatccagagcaaggccccaactctgttcaattctatgaaggctcagagaggtgaggaaactgcagaaagaaggcctgaagctagcagaggttggctgaggtttaaggaaagaagccatctctataacgtaacaatggaagatgaaccagccagtgctgatgtagaagctgcagcaagttctccagaagatctagctaagatcattgatgcaggtggcttcaccacacaacagattttccatgtagacaaaacagccttctattggaagaaaatgccatctaggacttccacagccggagagaagtcaatggctggctgcaaagcttcagacgacaggctgactcttgtcaggggctaatgcagctggtgactataagctgaagccagtgctcacttaccattccaaaaatcctagggcccttaagaattgcgctaaatctactctttctgtgctctacaaatggaacgacaaaacctggatgacagcacatctgtttacagaatggtttactgaattttaagcccaatgtatagatctactgctcaacaaaaaaggttcttttcaaaatatgactgctcactggcaaagcgcctagccatccaggagctctgatggagaggtacaaggaatttgttgttttcatgcctgctaacacaacttacaatctgcagccatggatcaaggagtaatttcagctttcaagtcttattatttaagaaatacattttgggctgggcgtggtggctcatgcctataatcccagcactttgggaggccaaggcaggcagatcacctgaggtcaggagttcgagaccagcctgcccaatatgatgaaaccctatctctactaaaaatacaaaaattagccaggcgtggtggcatgcgcctgtaatcccagctactcaagaggctgagacagaagaatcgcttgaacccaggaggcggaggttgcagtgagccaagatcacaccattgcactccagcctgggcaacaagagcaaactccatctcaaaaaagaaaaaaagaaagaaagaaatacattttggccaggtatgcctgtaatcccaggagtctgaggtgggatgatcacttgagttcagcagtttgaggttccagggagctatggctatggttgcatcttactgtactctcacctgggcaataatggatcaagaccccaactctaaaaagaaaaaaatacattttgtaaggctatagctgccatagacagtgattcctctgatggatctggacgaagtaaattgaaaaccttctggaaaggatttgctattctccttgcccttaagagcatttgatgaattatgggaggaggtcagcctatcagtattaacaggggtttggaagaagtttactctaactatcttgggtgactttgaggggttcaaacttcagtgaagaaagtcactgtagatgtggcagaagcagcaggagaactagaattacaattggagcctgaagatgggactgaattgctgcaatctcatgatcaaacttgaaagaatgaggagttgcttcttatgagtgaagaaagtggtttcttgagatggaatccattcctggtgaagatgttgtgaacactgttgaactgacaacaaaggattttgaatatcacataaacttagtggacaaagcagcagcagtgtttgagataattgactccaattttcaaggaagttctactttaggtaaatgctatcaaatagcatctcatactacagataaatctttcatgaaaggaagagtcaattgctgaggcaaacttcattgttgtcttattttaagaaattgccacagccacctcaactttcagcaaccaccaccctaatcagtcagcagccatagacattgacacgagaccttccaccggcaaaaagacaatggctcactgaaggcttagatgatcgttaggatttttagtaataaagtaagttaaaattaaggttatgtacattgtttttttttaaacacaatgctattgcacactttaatagactagagtgtaaacctcttatactcattgggaaaccaaaaatgtgtgtgactcactttattgcagtatttgctatattgcagtagtgtggaaccaaaccctcaatatctccaaggtatgcctgtataaggaatcatctaataacttttcatccactaaggtcctaaggctcatccatttgacatgtgtagccacagtccacttgtttcaactgaaggacaggacttcatgtaggactccaccaaaatgtacggatccattccactgtcgatggacatctgcatgatttccagtgttctgttactacagtgctctttttttcttcttttcttttttttttttaagagattgggtctcgctttgtctcccaagctggatgtagtggttcagtcatacctcactgtggccttggactgctgggctcaagcagtcctcctgcctcagcctcctgagtagctttgattacaggtgtgtgacacaatgcctggctaattttaaaaagttttttttggccgggcgcggtggctcacgcctgtaatcccagcactttgggaggccgaggcgggtggatcatgaggtcaggagatcgagaccatcctggctaacaaggtgaaaccccgtctctactaaaaatacaaaaaattagccaggcgcggtggtgggcacctgtaatcccagctactcgggaggctgaggcaggagaatggcgtgaacccgggaagcggagcttgcagtgagccgagattgtgccactgcagtccgcagtccggcctgggcgacagagcgagactccgtctcaaaaaaaaaaaaaaaaagttttttttagagatggggtcttgttgtgttgcctaggctaatctcaacctcctggactcaagcaatctttctgcctcaaactcctgagtagctgggactacaggtgtgtgccactgcactcagctcattttttgagacagaatcttgctcttgtcacccaggctggagtgcagtggcaccatctcagctcactgcaatctctgcctcctaggttcaagccagtctcctgcctcaccctcttgagtagctgggactacaggtgcacaccaccacgcccagctaatttttgtatttttattagagatggggtttcgccacattggccaggctggtctcgaactcctggcctcaagtgatctacctgccttggcctcccaaagtgctgggattacaggcatgagctactgcgcctggccccagctcgtcttctttgctattaggtttctatttaagtcttttgcacatctgcttatagggttgtttatcttttccttattgatttgtaggaactctttaaatatcttggatcattatcctttgtcctgggcctgaactcagtctccatcctttaattagctctgcaaccttaggcaagttccctgacctccctgagtctgtttccttgcattaaatgatgtcacaataccaattatgaggttggcagatgatgtacatggggttcttctcactgtgttgcccaagctggactgcagtgacataatcatagctcactccagccttgaattcctggactcaagtgatcctcctgcctcagcctccccagtagctagaactataggttctattagcgccaccatgcacggctaattttttaatttttttgtagagatagggtcttgctatgctgcataggctggtcttaaactcctgggctcaagtgatcctcccaccctggcctccaaaagagctgggagtacaggcacgagccaccatgtctggcataagggcagatttaaacattatcaaggatgctgaagatgaaatagtattccagccacattgaggtcatatataatagataaatctgtgttttggttgagaaactccctcaccaaggaaagacagaagaaaatacacagcaagtattcagtaacgattctgtgattaaggatcgaacatacctgagcgaatcactgaaataaatcccacttccaaggtttccgacgtctgttctttgcacaccacratcttccactactttgggtaaaagcaaccctctgaaaagagaagggcaggataaggtgtaagcccaacactgactgcatctcttccttgctcagaattttggcaggttcctactgaacttctggcattcagagaactctgcaatcagggtgaagccatggttgtttcyggaaacacaagggaaatttctgccttttattakataaacatctattgtttgaatttcacattaggagattgaatgaattttgtaaaatagcttttgggttttggtcctacttagaaagctcatccctacttaaagattattttaagaagattctcccatttttcatttagtatacttttatggtttgattttaaatatttaaatatttgctctgtctggagttaaagtatgagaaatgaggtaaaggtccaactttrtattttttccttgtggttacccatttatctctatagatagtattgaagaacttgtctttcttccacagagataagatctacttgtatcatatcctaaatcttctgtgtttttgggttcatttgtgtttaatattaatgtcaccctcattgtgcttcttttccagaattattctggtaatttcaaaatataaaaaaaatatgttgtagaatcagcttttcacttctttaaaaaaatcttattggtaattttatcatgattgcactaaatctatagactaatccaagaaaaactggcatccttctgattcatgcaagttgtcttttgggtccctcagtagcagtttaatggttttttggttttttctttcttttccccaggtggatcttgtatgtttctttttaagtttcttctgagtaattaatggatctacatttaacaatattttctcctgctcctgtgacttcagtttcagccctaatattaagtagtaattcaaagcaaacagaatcttagagttatgtttcaaataaacaactcatgttgtctgatgcacactctaatttctggactcttctctttaaatattgggctatccctagattagatacacatggaagactcatgaatatagaatcacttttcttcatacgatacagtcttcaagaagcaattcatacctatatactacactttaaaaataataaatacataatttttcaaaatagagataaggtcttgctaggttttccaggctggtcttgaacccctggcctcaagtgatccttctgcctcagcctcccaaagtattaggattacaggtgtgacccaccatgcctggccataaatatgtaatttaaattacacacttaattataaagtgtgtaattttctccagaatgcagtaagctagctgattttaactgaaaagactcacgtaatatagaaaaaagtaggaaaaaaagaagtaaaacacttcacatttgtgagcctgaaatttttgaaaaataaagatggctactcttaccgacacaagattcccacgatgttttgtacaggagaaccatgcaacaagggcctcacattaccaagtttgctcaaaaactctgtggtttcattcactctgccaactctaaatatctgcaagacatccactgggctcttactgtaagaattagaagaaaagcctttagattacataattggaaacaaaacaaaaagtcattatagcagaagaaatcccaaaagagtccaaatgtccattatcaggaaactgattcaatgagtcacagcacagcatatcttggaagtattatgtaggtattaaaataaccatattatttaacaaaaataaggatatgtagtaaagtatacagtaaaatataaaatttaaaagattacaaaactttatacatagtattatcccaattttgtcaaataaacaatagtatatggaatatataattcttgctctgggcaacagagcaagaccatgtctttcaacaacaataaaaaagaatgcaacttctggctgggcgcaatggctcaggcctgtaatcccagcactctgggaggccaaggcagttagatcactggagcccagaagtttgagaccagcctgggcaacatggtgaaaccccgtctctcctaaaaatacaaaaattagcagggcatggtggtgcacacctgtagtctcagctactcaggaggctgaggcaggagaatcacttgaacccggggcggggggtggtgtagaggttgcaatgagccgagatcgcgccactgcactccagactgggcgacagaacgagactctgtctcaaagaaaagaaagttatcggccgggcatggtggctcacccctgtaaccccagcactttgggaggctgtggtgggcggatcatgaggtcaggagatcaagaccatcctagccaacatggtgaaacctcgtccctactaaaaatacaaaaattagcagggcatggtggtgcacacctgtagtcccagctactcaggaggctgaggcaggagaatcgcttgaagccgggaggcagaggttgcagtgagccaagatcacgccattgcactccagcctggccacagagcaaggctccgtcaaaaaaaaaaaaaaaaagtgatcaaataccttaagtgctgtttaggaaaccaagcaggtttggagagagggttgtcaagaaagtactctcttgggaggtgacatttattggaatgtggcaccataaaatgtctattttaagacctcactggttgtgatgggttggatggggcaggagtagaggggagcatctggaaggacactgtagacaggataacaggatctggattaaagatggcggcagagtgaatggaagtagccaacagatgaaggacactttgaaggcagaattgacagaacatggttatgtggggatgagggacagagagaccccacactggctctgagtgggtagctaagatggggcagttgttgggggagacgggggtacggctgagggcagctgtggtgggaggaagggcacatcttcccaaccccatgtccagtggcctcaggtcagcaccttgacattagctgtggtgggagtatttgcttcccagaactcagcaaatattccagaccaggacttttccttcacagagctggcttaccagcacacccccgggtgagcagcatcggggtgattcaggctgggttatgttctacacccaaatgttaacagtggttatattatctcagggttgtctttgggtggtgagattttgagtgatttttaattttcttcatatttttagatattttctaagcttttagaaaagaacatgagttttataactagaaaaaagtaatataaagaaatcatgattagtgaaatgaaggaaatctaacttttcacagcagcaggatctttccctaggaagaagcccactttagctgtgtgactgcttttgtacttagggggtggggtggctcgccaagggcttgctcaggtagccctggagggctgaactgcagctgccactcccggggcttgacgtggctcttcctgtcttcctggagaaagcttattgccctccygattctaccttccatgtcaccggactcttagtacagatctcagcggacacctaggggagggtcaaaagtcaaaccaaaagaatttgattacatataaaaacaaaatctggagaaggcctgtgggaatgaatgtttttgagacagagtcctgttctgtctcccaggctggagtgcagtggtgcaatcctggctcactgcaacctccacctcccgggttcaagcgattcttgtgcctcagcccctggagtaactggaaccacaaacgtgtgccaccatgcccggctaatttttgtatttttagttgagacagggtttcaccatgttgcccaggctggtctcaaactcctgacctcaagtgatctgcccacctcggcctcccaaagtgctggaattacaggcatgagccaccatgcccggcccggactttttaaaaattaaagtgaaattccaaaaagataaaattaaccattaagtgtacaatttggtagtatttagtacagaacattcaaaatgtcatgtaatcaccacctctagttccaaaatttttatttgcccaaaagaaaaccccgtaccttttggctgtcagtccccaaccctccctctaatggcaccacacaatttgctgtctccgtggatttatctattctagatatttcatataaacagaatcgtacaatatgtggcttctttcactcagcgtaatatttttgaggttcacccatttgtagtatgtgtcagtgcttcattactttttcatggccgaataatattctattacatatatttatcacgttttgtttatccacttccctgttgatgaacatttgggttatttaaccaccttttggctgttgtgaatagtgttgctatgaatattcatgtacaagtacctatttgagtacttgctttcaattcctttgagtatagaactaggagtggaattgctgggtcttatcgtaatcaagtttaatttgttgaggaatcatctaacgcaggctgcatcatttttccctcccatcagcaatgtgtgatgctttcagtctctctatatcctcaccaacacttataattttccattaaaaagaaatcatatggctgggcgtggtggctcatgcctgtaatcccagcactttgggaggccgaggctggcagatcacaaggtcaggagatcaagaccatcctggctaaagcagtgaaaccccgtctctactaaaaatacaaaaattagccaggcgtggtggcgtgcgtctatagtcccagctgaggggggtggctgaggcaggagaatggcgtgaacctgggaggcagagcttgcagtgagcckagatcgcgtcactgcactccagcctgggcgacagagcgagactccgtctcaaaaaaataaaaaataaaataaaaaaacaaaagaaatcatagccatcttagtaaatgtgaagtggttttgggaatggattttgagaatgataaaggaaagtagaacataattttagatgggtctgagtcaggccataaggtaagagtggctgggtgtggttttagtggggctctggaaaaccagctctctaaacaacagcagcaacgcccccgcacagccctgatttgcagcatttgctgatttccatggcgcaaatcctccccgtgtccaatttcaagctacccatggtttaacaaccagctcaccaaatctcttaaatgttgacaactggctctcataagctggtgtgtgcggctacaactcaccaccatttgttctaagggctgtgccaagctgacgaagaggaactgctgcaatggaatgaaccaccaggtcaaaagagtcagtcccatgcttgagaacaagcatgcaatggggtttccaaactgagaagctgggcacagactcagccacggtgaccctcaggggtgctgacacccagcaagggctcatctgagcaggtggtccatcatgtttgttgttactggagaatgcccctcagcgcaggaccctgggtatgcacagtgaatgagggcccaagtgtaactggtatttaggaacgtgttttccaggttttcaggggcagtttttcatgccacagagaggccacrttagagacgccatacccatattcctgcacatttaaatcagtttaagtggctttttctctgtaataacctacaaaatacaaactcaaacacgttttaaaatttttaaatttaaccctcaacaagattaggtaaccttgaaatcgsagtggaatatagagggtgttttcaagcacagaaaactgccccaggcaccgttctgaacagagaagaaagtaatgtgtcatcacaccaccgctactgtggcttgttgctgaagattatctaggtaattactgtaattagctctttaayggagtctcaaagagcattatattataacagatcctgagatatttcctttatgcttacctgtgatgattctgcaaaacctcttttctaaccctgagaaattcttcagtattctgttcaacatgctcaattttgcacctcaaagctcggtatttggccagggatggtgggttgggtttggacaaattagtttcacagacattaaccatgtctcttattagctgtaggtggaaataatacacagatgtcagaatcaccacatrtcaaaattaatatttatatcacattaacactttctcaaaaagataggaaaagtccattttcccccaaagcttgttttactttatttatttttgagatgggtcttgctctcacccacgctggagtgtagtggcatgaccatagctcattgcagcctcaacctyctgagttcaakagatcctcctaccttagcctccagaattgtatttgaatgggcactatacgttccctcttagcaacactcatgaytgacattttttttttttttttagatggagttttgctcttgttgaccaggctggagtgcagtggcatgatcttgactcactgcaatctctgcctcctgggttcaagcgattctcctgcctcagcctcctaagtaactgggattacaggtgcatgccaccatgcctagctaacttcttgtatttttaatagagatggggtttcaccatgttggccaggctggtctcaaactcctgactggtgatccatctgccttggcctcccaaagtgctgggcttacaggcgtgagccaccacacccgactgacagactctttatgtttgatgttaggtaaatcatagaattttaaatttggaagggtcttatattttctcattgaccagttctttccttattttggattactgattcctctgggaatctgttgaaagcgattatttcccaaacatgcaaaatttcacatctataaactcctctgaagtctaggacacaaatctctgatcttggccaaatccctgcatgcacagatgagggaacacggaccaagagagtgacttcagcctagtctaaggcagggttggctgctgtggctgccttcctctactcactaagcctgcttctctcctggcagctcagaggagatggcccatttctgagcagccacagtggctccaatctcctcaccagtgactggtttgagattgtgcacatgacttcattctgaccagagaaatatgagtctgccaggggcttcctctatgtgacacaaaaagaactattacagatgggatgccatgaactactgcagccatctgcagatcacgaggaagccaggctaagagcagagccgtcactctacaggaagtacagagggacggaaggaggctgggaccctgataacactgacacactgagtctcggggtgacctgggccagcaggcagcccacagctggacttcttattgtctgagaacgtaaatgtccttatcgtttaagtcagctgcagtttcccctttctcctgcagaggatccgaactcattccagagtctgaaaagttattttacaagatagcaattttaaacctatttctgcacttatgtcactgtgccaacatattcacatttgaaaatatggtttaactttcataaggatccagggctttctaaaatggttcaacaatttattttctagtacaactctggagacaatttcatgaytcagtgttacctcattcatcagatttctaaagacccccaccctcaacatattttataataaatagaattctatatttcagaggtttacctggcagaggtctgctttcttagccaatagtcccaggttcacttctttgggcattgtgcctttgtgaggtatcagtctgtaaaactctgtcatcatcttttgcaattgctctgctgtttctccatttttcagtgctgcctttactagaaggagaatcccctctgccttgctcacctttcaacagatcayatatgcttattacaatgaaatctcaatacagaaattaaggagcatgcacaaaactatataaataattgttagacatgtcaagactatccattttctactggagagccttcacaaagcaaatgctgatctttattggagacgtatctcagttgtggcaaagatgccatgaggattgttgcaaaactaggctcagttttactagaagaaagaaccagagtcttatatttctatacatatgtggacacatctacatacctatacacagagagagaaacactaatgcaactgtgatagacttgcttttcacatgagaaatttagaaagctgtcagaatcagaccagggataaaaacctcctgaatgtgtttctaattacacaagtacttcatgggctttatcccagttagccattttctccttgagataaattagtttaattccacagaggaaaattgaccatattatttcaatacaacaatgcagttgcacaagttgtaccattggggtatcttcttttgtctgctcttttcattgcaattatgcttaatcaagaagggaagaacattttctrgtggtctggaggcatgcctgcctttcctaagacagaaggtgcragactgtggagtcactaggaaatggactgcggttarggcatctgactggggaccaagaccacccataaccctccagcttcctgcaagcctcttggcacagaggatcaggcctcctaattggccagcaccagaagcctgccttcgatcagctcttgaggctgacattttacagacagggatgtctagttttctcagaagcttttctccttagtgctgttagtggtctctttcttcagtaccggtacaaggaaagaacatttaggaatgaattccagagcagtcaggccagcatgcaaacacacgtgttattgctgaagccaatcaaccaggaggcagatttttcacattctgtttcagcgacacaccaacttacatcgttgaggctaatcctgttcactggcttgagaagcatgtgttccaggtggcccagggcctctgcccaaatcatctctactaaatcgctcacctcttggctcagagtgcttgaattcatgacttcctccaaaagcaactacaataataaaatagaaatgccaccaaaaagtcatcatgtgtgagtttgtgtaaaacttacatgggccaacgaacagaggtgtgaggagaaataattgattagagcccaggagagtcatccccagccaggtaactaaatcctttctctactagatcctccctctgtcttcctccattctctcttctctgattccctcctacccgcttttcttcctgttctatttttttccttcaccctgtaagctctaggcctgtcagtagtagtcaacacacgaagtcaggattaaggacccttgactcatggcctaggttgtaaagacatctcccaaaagctgggagggtctgctgctgaaataagcaatacatctcctgkcttgttctaaaacacattccccactcaacttccatgcctttctatgagttcagatttccttttctgaactcctcctcttccctcctgacatttatttatttacttgagacagggtcttgctgtattgcccaggttggggtgcagtggcatgatcatagctcactgtaacctcgaactgctgaattcaagtggtcctcctgcctcagcctcatgagtagctaagactacaggtacaccaccattcctgggtaatgtttttcagtttacgtagaaatgggtctctctatgttgccaaggctrgtcttgaactcctggcctcaagtgatcctcctgccttggcctcccaaactgctgggatacaggcatgagccacsaagcctggcccagtcttttatttgtaatagagaaaacatttctattaaaaatattcaatcaacaacaaaaaaattataaatcaatctcactgcttgcaattgttcagatgctaattgggttgcttcaggtgtgaaatgttctcttagtagaaatccttgtttcttcagttcttcaatgtaattttcawagtattcacttgcatcttcagaggttttctttatagcaaactgtcttctagtctgtgaattatggtgtatagcaaaagtacagtcattatttacatatctagctttattgaacrtaaataaagcattaggtccttgacatgaagaagcttagaaattagtttttttcaaagaattacttaaattttaaattctttttcttttctttttcttttttttttgagacagggtcttgctctgtcgcccagactggagtgcagtagcacaatctcaactcactgcaacctccacctcctgggttcaagcgattcttctgcctcagcctcctgagtagctgggaccacaggcatgtgccaccacacctggctaattttttttgtatttttttggtagagatggggtttcaaccatgttggcttgaataactcttgacctcaagaaatccacccacctcggcctcccaaagggctaggattacaggcgtaagccaccatgcctggccagaattaccaaaattttaaactcttaatagcctaaaacctggaggtagaggggaaaaagcttgagaatgcacagcagacagaaaagatcatttgtttcactggagagttactcaaagcttccttccaagtctacagactccttacaaaccagtctaactagcttgtaaatctggttttccagctttttggaaatgagaaaaaaaaaatctggaggggaaggggaagaaaagaaaaatacttcagaaaggaagaactgttagagacgggcacacagcgaaaatgaaatcacagccagtagacaggcaggaaagttattaggtcatgcacatgttaaaggctccagctcctccctcatcccaaactgcctgtggaggcggcactttctgctcttctgggcaactcctgccyctgtagtaggcagtgatcctaacattaaccccaggaaaatctggaagaacctgccccagctcaaagccatggtgtccttgtaggtgttggttgagcccctggcttgggggtgtggacccctgggaagccacactactcaggatacccataagccgccctcccagataggggggccgcaggatgcctctgaaacttggaaaataggagtgcctgttgaagtcactccatttaagacggtagagtttaacataattttggaagattcccatcaaaatggttttattaagcagaagggcaggctggaaaatcctcttcagcagaacggtggactgaggctcactgctatcaaggtggacaggcttctctgctcagcaaaccaggctcacccaggggtgctctacacagactcgggctcgctaagggaggaaggcaccctgagggatgtcctggcctacacgatgctacggttttctttctcaatgaagaaaacaacgacacattctatcatctctacagactcgggcttgctaagggaggaaggcaccctgagggatgtcctggcctaaacgatgctatggttttctttctcaatgaagaaaacaataacacattctatcatgtttttcaccttcrtttttacttacttcttaccyaaacaactatatcctccacaaaatccagtatgcatttcagggtacaagggtaacaaaaccctttctccttcttggacacatttgaccatggattagctttctagctctgttcccatggaaatctgataaagatggcatgtcagctgtaatagtaggcaaaattgcttatgtaattgtggcctctcattgataaattgcattgatactgggggctcaatggtgggaaacccaagctttgggcttgtcagagagcagtgactcatataattgggtatgtcccttgagggcatctggaacccgagacaatgctacaagagctatgggctcttgtggggtagggcttccaagccaagtggatctcacatccacctgacgtgagtctctttctcttgtacctgagctgacactcagagtgggaacaaagggaaaagctcctggagcctgtgtgggcctctgtgagggccactctcacggagaagtgactgtttcctggcccaagacagagctgtaggcaggacgcagtggctcatgcctgtaatcccagcactttgggaggccaaggcaagcagatcatgaggtcaggagttcgagaccagcctggccaacatggtgaaaccccgtctctactaaaaatacaaaaattagccaggcgtggcagcgcatgcctgtaatcccagctactcaggaggctgaggcacaagaatcgcttgaacctgggaggcagaggttgcagtgagccgagatcgcaccactgcactccagcatgggcaacagagtgagactctgtctcggggaaaaagaagaaaaaaaaagatagatctgtaactctgaatgtctacttgagaaggcatcctggtgggtgttgcagcattttatttgaacttcaggcattaattctaaatttatttttgtttcatgattgttttagattggaactgtgctcttgacctgatactgacctagggcaaaggtatggcctctgcaaagcctcctttgttgttcccagggctctgtgaccttgagccctcaataccccatatatatattcaggattggaaatgtcacagtggattgtaatgatgagtgttatttctttctagacagtgatctctgacgccagggtgtgaagctatttttatctttgagtgtcagccctagtcgattgcttggtacacagcaggtgcttaatgaagtatatcagtggaatgctttcagaggtgtaaatattaggaaaatatcccaaaagtgatgtggaacaagggcagaaatgctatacaccctgcacccagtaaacattcccttctagcgggaccctgtgctgatctactcagggggtgaggtcctcacctcccacactccaaaagagaacacatttcccctttgcaaaattatttaccaggtgttatggctgaactgtacccctacaaaatgcatatgctgaagtcctaactcccaggacctcaacaacgggattgtgtttggagacagagcctttcaagaggtaattgattaattaagtgagatcataagggtgggccctgatccaatatgactgctatcctcatgtgtagagatgaggacacagatgcccacaggtggaagaccatgtgaggacacagcaagaaggcagctgtctgtaagccaaagagagaggcctcacttcagaagaaatcaaccctgctgtactttgaccttggacttccagctttttgcactgtgagaaataaatgttgtttaagctccctagcctgttgcatttattaatagcagcctgagctaagacaacaggtaagaagaaaaaggttgggaggtcggctgattcattgaaaygagttatgaacagaggtcagtaaacacataggaatcaatataaacagcattacctccatgccatcatccaggaggaagtgtgaggatatcaggaaaggacagtccctggagtcccgcgaacactgaagctccaccaccacagcttcctggcctccctccattcccacctggaaaacaggatgtgctttcagaagctgcactcgggaaacatcaaactacatgtgccatttgaaaatgttgattayaattataaaatatgttcatttagagatataatttagaaaatatagaaaagtatcaaraagaaaattaaaatctcctaaaatcccgagagcaatacgatcactattaatattttggtatgtttccctcctgtatttttaccatcccataaatagatctgtgtgtttataccataccacttttcatgttttccttatcaaagagggaaatgttattttcaagttacattttattaacatatctcaaaatacaaatggaacatcactttgaaggctagtgtcgatttatatctatatatatattttagagacaggtcttgccacattgcccagggtggcctcaaactcctgagctcaagagatccacctgccttagccccctaagtagctgggactataggcaagtgatgccacatcagacactagtgttgattttcatttgtggggaaaaaaaaaaaggattttgtttttctttctaatgcaaaaggaatggaaacgcaacatagtgtaaatacttagtgtcaaaccttccttttccaaatacaagaaactgttagtaacagggaagagcacttttatgtttaatgccatattgatattttatactgtttaaaatttttgctatgagcatgcattacttttataatataaacactaaaaatttaaactttaaattctaaacataaacattttcttgactgttaaaaatcaggtctgggtgcagtggctcatgcttgtaatcccagcactttgggaggctaaggagggaggatggcttgagcccaggagttcgagaccagcaaaatagtgagattctgtctccacaaaaataaatatataaataaaattaactcatattttaaggactatatgatattcaggatatgcataatttttcaaaacaatgagaaaatgaccgaataggaaaaacacccagaagacattcaaacaggtgtgtttttttttttttttgctaactagaaatcagattcttactttctccaaggtgttatattttgcaacttcaaaatcttgaggaagatgaggaatttcaacattctgcataccaaacctgaaatttgtagtgtataattaaaattttaacattaaatggattttaggctaaacagaatttcataaattttttcttgtacatctttacaaaatacatgatagattccttacaaaacacatggtaagtccacatggtaagtccctaaggcctccttagctcttycagaaattgttaaaagatcattggaaatgagctggatgcctcctctgcataatctccagctcagatacccagcactgtagcgtctgcactggaagatggtctccacrcggcagaggcagaaagaagtgggccgcacactctggggatgggctacttgtgtttgctttggatctgactcttagaagctatgtcactcctctccagaccacagtccattcctctctaaaataaaggagtcagacttctcataatctgtacttttcattttggattttcttctctttaaacactattattaacaaatacaacaagattgaatgtgatgcctaattaacccgatgttttgggtatgctttaagaaaccatatagaactttagactcccatactccatttgaggaaggctgttgttatttccatttttgaaaacatcaggcaaaagtaacaaactgtctttactctaaaggctgctcaggaaaataataggatgaaaataggtttttttttaaaagaattaaaaaaaaaacccactggttttctttttaaaaatcaattcaataattrcacccaatctcatttaatactgagaatttaaaataatgatcactatactagttgaagaaaaagactcaaataaaaaatcacttgagttagatatgcaaaataaattaaaataagaaaaagtctacaaatagaattttaatactgtgcttgaggtttacacaagattttacaaactctgtagagtcccaggaatcagaaagaagtaaattactcagtgagttccacagtgtcttcctcctctgtggcactgtccgggcatagaccttctgttttcacttctagaattaaaagcaaacagcacacttgtttactgcccaaagacttactataattagttaacctaagtgctggaattgttaagattcataaatatatccttaaattagttataattttggtgatcaaaggataacccagtgggaaaagaggaaggtataaccttataaaatagggagaayatactctaattctattttaataagcatatcaggaggattctcatctgttattatttgaaactcattgatagccatacaattttcaattggcactttcttcttgaagagtacaaagtgcacaggatcagaatgagttcctgagagtcggcacatcacgagcgaaggagctggagatgttctagcttagaggagggaaagtcaagggctctgcatgagcttttgcttcatactttctgtacagagaaacagtaacactatctagagcattgtgatatacaggaataactcaatgtgaggacttctttccagttttaattatactgtcaagattccaaggatcatcagtgtatttgtagtaatttggaatctgaataaattatgctggctgtcatacagtatgttttcaatgtgaaatgagtctactattttatttctgttgtaactatcatttgctgggacatgtgctgggactgcagcagcatttctggactattgtctaaggaggctccaccctgccaagtcagtacggtatctaacacataccgtgtgcttactgtgagttagtatttatcagaactgtgtgatttttgatatgactcaggaagagtgcatttttcatgtccaaaggctttcttcttggccagtttccaaaataaaatcttggcttataaagaaaatatgtttcttttggggagacaatcttttgtttggaaagaatttcttcagcaaaatgctggtcatcaaatttccagtcattaggttgtagtaatcactgtttaacacaaaggctttcccctccccctagttaaaagcacaatcaggttttctgagatgatcagtgttttgtggccattttgagtctgaccctactaggctagatatcaagaaatctgtttctagtgctaaagtagtcttttgtcytttgttatttttctgtccattttctgaggtaataagtctaatttttttttagtatttctggacaattctctgcctatggtatctttgacaaacccaagygtgtactatggcacctatgatacgttaaatgcttgctatgaaatacctaccagaactgctcgccttctgatcaggaggtggtgtgatgtccaggggcttataaggatcataattctttacatccaagagtctcttttcyctgatagatttccatataaaatctgggtttgcaatatgaacgtggttcttttggatagaattcagttggtactgactcagaacatcagcattatctaagattatatgtgtgcactaaggaaaaaaagagtcaatccattatgcatcaagaaaaacaacatttaaataagatatttgtatctgtaattttcacccttagaaagtattaaggtagtttgtgataatctttctcaaatttcgaaaaacctctataaatatcacagtttctagttacataaacattttaaaaatcaactgtttttaaagratatggctacgaatgcaccataattgattaaccctagaggttatttctaaattttcattattgtaaacaacgctgtgatgactatcctcatgtacacatccttgtgcacttgttcaattattttcttagtagtggaaagggaggttcaaaggttattatttattttgatttgtaattttagaaaatcttgttttttttgtagagatagggtcttgctatgttgaccaggctggtcttgaactctcagcctcaagygattctcccatctcagctgagtttacaggcatgagccaacatgcccgcttataattttatttattttttaataaatagtaaattcacattgyagaatatctaaaaaataaaataatgacgacgtattaacttcatccccactgttgtccccagttcctctctgcagaggcacctgctgtcacttgctcctcgcgaatcctgctagagctacactatgcgtagatacatggcagcgtgctcctcagcctcttccgtgctggcttttccactgaaattatcttggtgattgttcctcaacattacatatacagctgcctcattatctacagtagctgggatgcacatttcacatgtttatgtacattgacttccacaaagttgcactcacagtatgtgactttctaaaaaggagagaccatgttggcagttcacacagaagacaaactgagaagggagagcaggcacgaattactcatctgtccagagatggtgagacagctcagtgtgggaagctgtataagggaagtatatacaattctacctgaattggaagtaaacagggacattgcatttctggtattcagctggagttgaacacgcttcacagaacagatgaggctcacaatggccaagccccagggctgaggtccagggaggggcagggtgagtcagctcatcaattcgtcaacagagggaacagcagaggacaggggcaggccagcctggcacctagagcctttggatttctatttttacagtgaggtggtttaaaaaagaggaggttaaactgaattatttctaagatttcatccagctgtaaaatcctattattctgaactgccaggcttacaagttcaagaggcagaaggtaaattcctgcagcctttaaatgaacaaaacaaacagcacaagctacactgcgaagatgagtctgcactgcatgtatttctttctacacccaggaacctggcttaccagtatatcaccccagcrttgacatactggtgagtgacgacagtgcgctttttgcaaatcctgtgcactatgacttttctccttcaagaatagatatggctggtctgaaattctattttcatatttggctgtgctctagtaatatcctgcttcacaggacatgtaggattgtcctgcagttcagggaacagggaggggacagggctgggccacytctgcctctaggagcccagcctcccaatgggccatgtcagtctctcctgatgaacttcgagtagctcactcactctctcctgctgctaatctctgcttcctcttctaaccatgaccctgttccctgaatgcgcaatgttttatcacactgtagtttatgacacttggaaatacctgaggatttaacgaaaaggaaaactttccgccatkttccttaatgtcagtttgtagctttttcttctgctgctgaggtaagtacttcactttcaaacagaagatacaatttgcaaagattcccatcaccatcctgtaggaaamaaagtttttaaggaccctctcttaagtcaatatgacagtgaatttagaattattatacaagcaaactgtgggaaaattgggcattatcttaagaaagatattgcaatcatgttatcaatagaacattgcaaaaattgaataatatcstagcttgcaatatgtgtgttggtttaagaatcgtttctagcttttatggttgatattacaccaccaaaaatccctttgtacaggctcatgatatacatcttaataaaaacatgasagatttaagttacagatcaagtgtgtgactccagaacatggaaccatttatttytaaattagaaattaacattatttgatagtgaaaccatgggtttctttaatatataattctatgcattcaaaaagactctttatgtggacttctattaggccattctggggaaaaactgaacagctgataataaaaatatacaactatgtttaaatggaatatgtatgtgtgtgtatacacatatatattctgcatttaggttctttttttttttttttttttttttgsagacggaatctcactctgtcacccaagctggagtgcagtggtgcgatctcagctcactgcaacctccgcctccctggttcaagcgattcccctgcctcagcctcccgagtagctgggactacatgcgcgcaccaccacacgtggctactttttatatttttagtagagacaaaggtttcaccatgttgaccaggctgggctcaaacccagcctcccaaagtgctgtgattacaggtgtgagccaccacacccagcctgggttaatttaattaatttactgtacaacacattctcaattttgcatcgaaatgtgtatttaacaataaattaatacatggtgaaaaattgtgtttaatttccattttgtaaaattttttttttgagacaatcttgctctgtcacccacgctggagtgcactattgcaattttggcttactgcaacctccacctcctggattcaattgattctcctgcctcggtctcccaagtagctgagattacaggcgcccaccatgacacctggctaacttttgtatttttagtagagtcgggggttttaccatgttggccaggctggtcttgaactcctgacctcaagtgatctgcccaccttggcctcccaaaattgtgggattacaggcatgagccaccgcacctggcacacccccgcttttttttttttttttttgagtcagggtctcactctgtcacccaggctggagtgcagtagcagatctcagctcactgtaatctctgcccactgcaatctctgccttccgggaagagaaggtgagggttaaagaaagacacacacacacacacagaggagaaagaaagagagaggagacagagctagagagcgcgagcttgacagcaaatgcggctttatgtgcagcacaaaacctacagaagtaggggaccagcctaatgccacagcccactgctaagtcttacaggctaagggtacttataggtatgggcgggaggggtctgggcagcatggcttgttgccctgcaagatatcgataagatgttcccatgatttgtattgatttgtacaataagggttctggcccttattcaggtggatgtcatcatggtgttccttggacgtttgcccaagaagtcatgagagggaagtttcttcagataagcctctgttggccttgcggtcaagtggttaggaaggatgtttctcaccgcctaaaccccccagaaatgtttcactttgcccaaagtctgcaaaatagcgggcagcttacaaaatgttgcagtttgtgctaacgctgggttcaagcaattctcctgcctcagcctcccgagtagctgggattacaggcccgcgccaccacgcccggctaatatttttcatttttagtaaagacagggtttcgctatgttgcccagactggtatttgtcaatttttaaaaacaaggagtcacgtctaacaggctccccgcaaagtaagctgccatttggcgacagcagtttccaagtcctgtattagtttgaggatcgcggttccgggtcctgtgttagcttgggcaggcaggtcaggttctctgccgcggcccacgcgtcttgggactaagctgagttgctgaaagcccaccgccctgcaccgcgattgggctccgccatttcccctttgcctgccctttcacctcccactcctacaggccagaggccccaccctacctagtgctgtgtctggaatttgtgggttcttggtctcactgacttcaaaaacgaagctgcctggaccctcgtggtgagtgctacagttcttaaaggcggcgcgtccgaagtttgttccttccttggtctcactgacatcaagtatgaagccgcagaccctcgcagtgagcgttacagttctttaaggcggcgcatccagagtttgtccggagttgtttactcctaccggtgggttcgtggtgtcgctggcttcaggagtgaagctgcagacctccgcgatttaaaggcagtgcggacccaaacagtgagcagcaacaaaatttactgcaaggagtgaaaaacaaagcttccacagcgtggaagaggaccccagcaggttgccactgctagctcgggcagcctgcttttattcccttatgtggccccacccacatcctgctgattggttcattttatagagcgctgattggactgctttgacagggtgctgattggtgtttacaatccctgagctagacacaagttctccaggtccccactagattagctagacacagagcactgattggtgcatttacaaaccttgagctagacacagggtgttgattggtgtgtttacaaaccttgagctagacacagagtgctgactggtgtattgacaatcccttagctagacataaagttctccaagtccccactagactcaggagcccagctggcttcacccagtggatcccatgccagggccgcaggtggagctgcctgccagtcccatgccttgcacccgcactcctcagcccttgggtggtcgatgggaccgggcgccggccgcgctcctgcgggacgctcgtgctgcgcaggagccaactgaggcgggagagctcagacatggcgggctgcaggtcccgagccctgccccgcggggaggcagctaaggctccacgagaaatctagcacagcgctggtgggccggcactgctggggtacccggcacaccctccgctgctgctggcccgggcgctaagcccctcactgtccggggccggcggggccagcgggctgctcagagtgcggggaccgcccagcccacgcccaaccggaacttgcgctggcccgcaagcgccgcgcacagccccggttccgtcctgcgcctgcaagctgaaggagccggctccggcctcgccagctcagaaaggggctcccacagtgcagcggcgggctgaagggctcctcaagcgtagccagagtgggcgccgagagccagcgagggctgcaagggctgccagcacgctgtcacctttcagtacctttgccctgtgtgtgttggatggtggtacccattccctgggctctcaattgaggacacaatgccastgcctccctgacacctcacctctgggtctccttggcaccacagaggtgcgacgtccccagcctaggcctccctctcccccttggctggagacaaccactgggtgctattcttgactccctgcacccccatctccttctgccagctgtatctcttccatcacagcccctgatatagccccaatgtatagaacttgtccctcctgctgccaccctggcccatgccctcgcatcctgactggctcccactcctgttgcgcctgtgttcaatctcttctccacactgcagcttcaggaaacttgttgtttttaaattacatttcaaataaaatacaaattgcttatcatggttcaaggccaacagctatctcattccctcctggccacactggctttttctaaaggaggaagaaacccacagcttggtcctccaagtcttgacacatgctgttatatattatagttcttatctctgggacccccagcccttcctcaccccatgctgtatcccccatccaggacacaatgaatgaacacattagggattcatattttttaatctttcttttgaggtccggttaaactgaagtctcttgatgtaattctgcctttccataacattagcatggaaaagtttcatttgttgactgcctctcacattcaattagcatctgtgcatagataggagggatgaaatgaggggtaccataaaagagattacaccacactatttaggttaatctatgctagtcgtaatctctgacaattaaaaacaacacacaaaaaaaaacactaaaagcctttaatgactctttaataatttccaggacagcctctatgtgataattgcacccccacttatgctgaccaaggttggctgacatggagtggctgctcaagtccaccttcagatgggtcctggatgtgttaaatcctctgacctgtttaaaacgtgtttcctggaaaagtgactcatggtcactgttgaaaatttgaaaaatacagaattgtataacagaaaaaaaaagaacaaaacaaaaaaatctcaaaacctagggctatgttagcatcttgttttgcatttttcttctgggcttttttctaggtctattataacactttgttttttgagacagtctcgcttttgtcacttaggcggaagtgcagtggtgagacctcggctcacggcaccctcygcctcccgggttcaaacgattctcctgcatcagcctcccgagtagctgggattataggtgcctgccaccatgcctggctactttttgtatttttagtagagacggggtttcaccatgttggccaggctggtctcgaactcccaaccttaagtgatctgcacaccttggcctccctaagtgctgggattacaggcatgagtcacygcrcccagccacagactgtattttttatcaaaattgacatcacactacctatcccgctgttatcagtcagcatctttagcattttgtcattaaatattattggaaaacatttttaatagagactatcagatatggaccataaatgaattattgttggaaaattaaatcatttctgatttttggtatcataaaaagctatgatgaacatccttatgtgcaaatccttgtttccatctccaacaatcatcttagaaaataatactcaactagaactactgaatcaaagtttgaacaatttttttgtgttaaaagttaatcactaagaagaaaaaataaaaagcacctaaaatgatggaaatgctcaaaactagactgcagtgatggtgcacaacttggtaaattattaaaaattattgaattaggccaggcaatgtggctcatgcctgtaaccctagcactttgggagaccaagtggagcaaatcgcttgagcccaggagtttgagagcagcctggccaacatggcgaaacttcatctctacaaaaaatacaaaacttagctgggcaaggtggtacatgcctatggtcccagctactcaggagacttaggtgggaggatcacttgagcctgggaggtcaaggctgcagtgagctgtgatcatgccactgcactccagcctgggtgacaagagaccctatctcaaaaaaaaaaaaagagagaaaaattactaaattgtacaattaaaatgaatgaatttaatgtatgtaaattgtaccccaatacattttttaaatagtattttttggatacataatagttacatacatattatgggtcaataaagttatttttaaaaaagcacctgatccctccatccagaaataaccccactgttgatttttatttgtttgttttttgagccagtctcgctctgtcacccaggctggagtgcagtggcatgatctcagctcactgcaaccttctgcctcccaggttcaagtaattctcgtgcctcagcctccaagtagctgggactacaggcacgcaccaccacgcccagctaatttttgtatttttagtagagacggggtttcaccatgttggccaggctggtctcgaattcctgagctcaagtgatctgcccacctctgcctcccaaagtgctaggattacaggcatgagccaccacacctagcccccactgttgatattttaatttttttggtgttattatttcttgtatcattgtattttctaaattattaatattctatatttaatgttatagccagttgctctttactttttaaataggactttcactttcacagcttatttagcttttagtgatatcctccccatgtcactaaatattmtttgaaggtgtttttagtggttacataagctttgcgtttatttcatccttccccaagtcatcagatacttggttacttaaaagtgttcactattggccgggcgcggtggctcacrcctgtaatcccagcattttgggaggccgaggcgggcggatcacgaggtcaggagatcgaggccatcccggctaaaacggtgaaaccccgtctctactaaaaatacaaaaaattagccgggcgtagtggcgggtgcctgtagtcccagctacttgggaggctgaggcaggggaatggcgtgaacccgggaggcggagcttgcagtgagcggagatcccgccactgcactccagcctgggcgacagagcgagactccgtctcaaaaaaaaaaaaaaaaaagtgttcactattagaaatacactttaattaaaatgcttgtacatatatttttttgccacatctctgtcatagtttccctagagttgatggccagaaatggaattactgaatcaaggagtataaacattttttagccttttaaaaattgtggtacagtttttaaaactgtgtgtacagttcagtggcattaagtacatacacatagttgtgaaatcaaagtataaacattttattttatttgagacagggtctggctctgtctcccaagctggagtgcagtggtgtggtcactgtcacagctcactgcaacctcgacctccctcccagcaatcctttcacccggcctacttagtagctgggaccacaggcctgcaccaccatgcccagctaattttggtagagacagggttcttactatgttgccaaggctggtcacaaactcctgggctcaagccatcctcctgcctcagcctcccagagtgctggggttacaggtgtgagctgccacgcccggcccagagtaaaaacattttaaacataaatctgcggtctgttcttagcacctgcggctgcgtgggaggtatggaaaggcgcactttgggtttcgtgaaatctcaagtcaggtcttgacttctctctttccacagattcatctctagtctctgtaaaatgccagccctcttctgggttaacagcgcctaaccgacatgcgccactagttcttccttgtttcaaagtgttctctaaacacagagttagttcatgttttcatcagcgctgattacgtacatatgagatgtggcggacactgggctaggggctggttattctctaaggcaaatctgcacagtcactccagcctgtcccccttcccagcttcttccccaaataacattcacagagtgtcttccacccaaagacagcagggaacagccccgattcctaagaaaccctcagcgcgcctcctcacaaactcttggctgctccataaaccattggtgtaggtggaatcaagtggcttcctgcttcacaggtcttcgtctttaccactggcatttcctcctctcggaaaaccctgaggagtccctttctgggcagtcttgattctacagcctccgccttccgaagtgtgtgagtcagcacacgctaagatcacttttgatatacagtgggcattcaataaaagcttgcttactaaaaactctcacgtatccattaaagcccaggattacagaaaagccttctgacactatttgcattttggactcaaatggcatcagtaatgcacctccctaatgggtttattaaacccttaaacaacaaaggtactacttttatttcactcctacatgatatacagtagctctacgcacacaaacaagacctaatgtttacttaataaatgataaagtcagatgtaatgagtctgcaacacgcacatctcagagcgaacttcccctttatcatagcactatgcttggatattgtcatataattgttgtcatccagcagtccagaattgaaagtgcttgggcttgaatatttagcagcgccttagttttctagaacctgtgatctaccaactcgatccctgggtgaaccattcggccctcctagcaggaattacttaactgagttagaggttttcaactttggacctcaacaaacacattgtttctatcacggtgttcccaatgactcacgaggtcagatagtacttcctgattactcaccaaaccaccttactttttgcacaattcgaaacctaactttaggaaagaaggccgtttggcatactggaaacaagaaacaacgcrtkctactgcgaaccgcaccgcacggggtgcggagacttggtgtgactgtcggctccggtgggcgccccccaccgcacccggtttctcgtcaccagggctgcgccgcggggcagagcggaacgaccgcaatayccctccccgagggcgctggctgcactagctagtccactcccgagcctagcagcgccgtcaggcccacagcgccaacgccgcgcagggcaagggtgcagccactggcgggaaagtagtacgcgggccacttcctggctaggactacagggacctttgcagccccccaccccgcagcgcccacgcacctgcctagaggatccagctagctccggacgctccccgattccgcgctccttgctcgcggtacttccgtaatctaggctctccctgcccccggggctgggcgggcgccactgcgccggaaccccgccccgcaycaggcgggcgcagcgtcccaagcagggacgatagccggaacgcgcccggaatcgggtccgccaggtggggagcgggtcccyggcctctggcggggtttctcttccaagatcagccggagggttcagggctttcagtttcatatttcaggagggattttgtcaatgaggattaatacaaagctcggctttgagagaggtgggtggatggtgctgtcctttaactgagaaatggaagggattcacaaggccgggaaagaagaaaatttcgggaaagttcgtggaaacaggagagtgagataataaatttactttaagccttcctgcgtttgaaattcgtgacagtgtaactagttggaaatatatttatctgccattcaagagaggcagggggctggagatacagatctgagattcactgaaatgggaataaagcaatggggaagattcagatttttaggatactgaataaaatgagaatagaaaggatagagtagagaatacagtggaaagggtatggggttgaatcctgactccacaatttattaccaagggggctggggacaaggtaatttaccaagtttcatcattacaacctactctatagggttgtctaagaaacaacaagagattctgggggaggagagagactgattcctagagttaccacatcgtaatgctcaaaatgtccaatcttcaacaaaaaattatgaggcatgcaaaaaaaaaggcgaaaaaatggccaattcaaaggaaaaaagaaatgaacagaaattgtccctgagctgaggaagsacagacataggaattattagacaaatacttcaaataaactgtsttaaacatggacaaaaagtgaaaggaaacatagaaaaataactgaaagaaacaaccaggagaacaaagtctcaataaatagagaatatgcaatagaagatgtgcaaatggtcaacaagcatgaaaaaaagcccagcataactaattatcagaaaagtgcaaattaaaactgcaatgagataccatcttacaccrgtcagaatggttattattaaaaagtcaaggaacaacagatgctggcaaggctttattgaaaaggaaatgcttatacactgtcagtgggaatgtaaattagttgaaccactgtggaaaccagtttgaagatttctcaaagtgctgaaaacagaactgctattcaacccagctatcccattactgggtacayattcaaaacaagagaactcattctaccaaaaagacacatgcactagtatgttcgtcacagcacgcttcacaataggaaagacatggaatgaacttaggtgctcatcgacaatggactggataaagaaaatgtggtacatttgcaccatggaatactacgaagccataaaaagaatgaatggaatcatgtccttcacagcaacgtgactgcaactggaggccattgtcstaagtgaattaatgaaggaacagaaaaccaaataccacatgttctaatttgtaagtgggagctaaacactgggtactcatggatataaagatggcaacaatagacactggggacaactagacagggagggagggggaggggcaagggttgaaaaactattgggtactatgctcagtccccgggtgaggggctcagtcataccccaaacctcagcaccacgaattatatgtaggtaacaagcctgcacatgtaccctctgaatctaaaataaaagttgaaattatttaaaaaacaaataaggaatattaataaagagatagaaattataaaaggaaccaaacacattttggaactgaaaagaaccaaaaagaaattgtgtagttaaaaagtacaataggaccaggcatggtggttcatgcctgtaatcctagtgtcttgggaggccaaggcgggaggatcgcttgagaccaagagtttgccttggcaacatagggagatcccctctctacaaaaaaattacaaaattaaccgggcatggtggtgcatgcctgtggccctagctactcaggaggctaaggcaggaggatcacttgagccaagaagttcatggctgcagtgagctaagatcacactcctgcactccagcctgggtgacagagcaatatcttgtctcaaaaaaaaaaaaaagaagaagaaaagaaaaagaaaaaaatacaataacttaaatgaaaaatacacaagtgatgctccagagtagatttgagcaggtaagagaaggaatgagcaaactcgaagataaaactgttgaaattattaactctgaggagcagaaagtagaagaatgaagatcaaagtccaaaagatttgtggacaccatcaagtgtatcagcatatgcataaagggggtcccagaaagaaagatgagggtgaaggtggcaggaagagtatctgaagaaacagtggctccaaagtccccaatttgttaaaatacataatgtaacacttcagagaagctccatgaacttcaagtatgataaactcaaaaagtccacaatagagttatattaataatcaaactgttgaaagccaaagacagagagaagcttaaaagcagctagacagaaatgatcactacatacaaaggaacttgcataagattaacagccaatctattaccatgggagccagaaggcagtgggatgatataaagtgctgaaagaaaacaaacaaaccggcaaccatgaattctatatctgttaaaactctcctccaagaaatgataggccaggcacggtgactcatgcctgtaatcctggcactttgggaggctgaggcaggtggattgcttgagcccaggagttcaagaccagcctgggcaacatggtgaaaacccatctctacaaaaaatgcaaaaattagccaggtatggtggcatgtgcctgtcatctcagctacctaggaggctgaggcaggaggaacacttgagacctggaggttgaggctacagtgagttgtaattgtgccactgccctccagcctgggtgatagagtcatcccatctaaaaaaaatgtgtaataaaaacctatagaatgcttgaagaaccatccaactactatataattattgctatttttgaagaaagcaaaaatacaggtgtgacaactattatggtattgttctgctcttattacaacaaagattcaagctagaaatcctttactatctattcaacttcattcatcatcggtcaggcattctagaatgtagtggatgtgataatccctttgctgtatagactcattaggtttccaggatgttttgttktaagtccaatgcaccagcaatagatttacctatatcaaactgccaagatttaaaaaatgtctctcagcacccaaggttgttgttagaaactttccagaagtaattctggaaatctgaggtttcaggccttggtgaagaactccttcactcttcctgcaggtgaagsaggatgtgggttttcttgggtttgcctagaggccagacacatgcatctctcagtgcatcttcccaacctgttagaattcccctttctggcctggaagacatgggcttggggatcatcccttggccaggctagcacttatgttctctcttttttctttttaagagttgggggtttcactctgtcgcccaggctgcagtctagtggtgtgatcataaccttaaactcctgggctcaagtgatcctcctgcctgagcctcccaagtagctagggctacaggtgcatgccaccatgcctggctaacattcaaacttctgggcgcgaatgatccacttcagtgtttcaaagtgctgggattacaggtgtaagccactgcacctgacatgtcctctctggacagagtggacacttgctaccatcagaccaacaatgaaaagttgtgaactcttggctgggtgtggtggctcatgcttgtaatcccagcactttgggaggctgaggcggtggatcactggaggtcaggagtttgacaccagcctagccaacatggtaaaaccccatctctactaaaaatacaaaaattagctgggyatggtggcgcacatctgtagtcccagctattcaggtggctgaggcaggagaatcacttgaactggggaggtggtggttgcagtgagctgagatcatgccagaaggaaaagtcagcctgtattccatcaaccaatgataccaaaattttaaggataatctaaagggcgggttttgataactagggaacagctcagatcattcgcatcactgtctgtgtgggtgctccaggtctaatgtgctgattgcagggctgcagagttgactcctgcatgttctcacacgtggaataggagttaggcagctgcagctctgccgtgcccacactgtctgcacagaagcagcatctaaatatactgttacttaaatctatgtgaaggtcactttggaatttaaaaaatttcatgattttggccgggcatggtggctcatgcctgtaatcctaacacttcgggaggccgagkcgggcagattgcctgggctcaggagttcaagaccaccctgggcaacatggtgaaactgcatctctactaaaaatacaaaaaattacctgggcatsgtggtgcatgcctttaatcccagctactcrggaggctgaggcatgagaatagcttgaacccgagaggtggaggttgcagtgagctgagattgcaccactgcactccagcctcggcgacagcaagactctgtcttaaaaagataaataaatgaataaataaagaaataaataaatatttcatgattttgttaaacatcacttcctaataaagggaaaaaatacttttgtcactgtggagaagcctttgtggggtggagtcactactggggataaaagagaaaatgttgaaggaagtcatcagctttgttgcttttcttaattgcaaggtttgagtttcctgcctgatgatcagagccagaagcacaggtctccaggaaatgccaccactggatagagagccacacgctgcttcctatcatacgtctacctggacctaactcaggaagaaacatacacttcctacattttatcccataagcaaagcaacttctgtagaactgcccatggagattttgtcttaacttcaaaaagtgcttctcctaatttattttctgttgcacggtatcaagaagcacctgtggaaaaaaaggattcaaaagaagaaaaccataaccatcttacaagtgagttaattgtgttcctctcttctgtacttaactcacagtgttactaagttgtcctaagataagagaaggcctttctgtgttttttgtttaaaattcttttttcagagatggagtcttgctgtgttgctcaggctggactcaaactcctgggcataagcagtcctcccccttcagcctcccaagtagctggactataggcatgtgcttccctgccagctcttgctctcatgctctctctctstststgtgtgtgtgtgtgtgtgtgtgtgtgtgtgtgtttgtcccctgtggctttgtttttttttttttttggagacagagttttgctctttggcccagcctggagtgtagacgcatgatttcagatcactgcaacctctgcctccagggttcaggtgatttcttgtgtctcagcctcccaagtagctgggattacaggtgtgcgccattatgcccagataattttttgtatttttagtagagatggggttttatcatgttggccaggctggtctcgaactcctggcctcaagtgatctgccaccttggcctcccaaagtgctgggattacagatctgagctactgcacccagccataatttgtcattgatcacttttcaaaaacacgttttatcatgctattttctgtaactgaactcaacatgtttctacgttggtcactttttagagacccattttcttttttcttacttttctattacactttacgttctagggtacatgtgcacaacgtgcaggtttgatacataggtatacatgtgccatgtttgtttgctgcgcccatcaactcattatttgttggggtgatcaggcccaatcccagactgtgggggctacgaagtccagcggagtcaaatgaataagacaagataagttaacggtgcataaagtgggtccagggggctgacactagtatggaggctgtgaaggccccgagctctgggagcccacactatttattggtgatcaaacaaagaagcaggcggtgaggacatgggggtygaaagaaagtgrtgcatcaagtgtttgatctatagctgtgtcagtttagcattttctttgaagcatatggaacgagttcagttacagaaaatagcacatcatctaattttttagcaaaaagctagcatttactttttagggcaaggtatttgcattttctgtgtgggcctaatatgctcaaaactgagttttytgatatttgacaggacgtgtttttttaaactgctcttagttaatacatactaaattcagtgaaagaaaacagcacatgtrttatttgtgtgctatatcttgcttttagcatttagggatgtatatgcatatcttcctgaaagtacaaagtgggctcagaaatgctttttttaaagttgtctgaaacattgtttaaaaaaaggatcaatatctaaacatgttctgttcagtgaaagaaagcagcacatcvtctagatttttggcacacagctttcatttacttttcagagctagatatttgcattttctgtgtgggcctactatgctcagaattgtgttgtttgagatttgacaagttgtgtatttgaaaactgctattagttaatacacgttgaatttagtgaaaaaaaaaaamacagtgtattagacattatttgtgtgccatatcttgcttttagcatttaggactgtattttcatatcttcctgaaagttctaactaggcttttattagtttttttctgagtgtgtacaaacgtgtttttaaaaatgaatcaatgtcaaaacatgttgaatttggagaaaaaaacagcacatcaggtaggtttttggtacatagcttgcatttaccttttagggcctactatgctcagaattgttttttctgagatttgacaagctgcgtctttgagaactgctataccatgtagaattaagtgaaggaaaccagaacatcatctaggtttttggcacaccgcttgtgtttaccctttatgattagatatttgcattttctttgttggcctactaagcttgaggttgtgttttctgagctctgttttctagatgtgtttttgataattgtgttttctgagatgtgtttttgaaaactgctctcagttaacacatgttgaattcagcaaaagaaaactgcacataacttatattttgggtgccatgtcttgcttttagcatttgtagctgtacatgcatatcttcccagaagcgctaactgggctctgaaatggtatttgagcttgtacaaaatgtgtttttgaaaagtgatcatgtaaaagcatcttaaatttattgacagaaagcagcacatcatttaggtttatggcacaaagctggtgtttaccttttagagctagatattcgcattttcaatgtgggcctactatgctcagaattaggttttctgagatttgacaagatgatctttgaaaaatgttcttagttaatacatgttgaattcagtgaacaaaatagcagatcatacatattttgtgtgccataycttgctgttagcatttaggactgtgtatgcatacattcctggaagtgctaactgtgcttggaaatgttgcttttggagcttgtagaaaacgtgtgtttaaaaagtgttcaatgtcaagacatgtggaactccgtgaaaaaaacagcatataatatataggtttttggcagaaagcttgtgtttacctctgacggctagatattcacattttttgtgtaagactactgtgctcagaattgttttctgacttgaaaacatgtgtttctgaaaactgctcttagttaataaacattgaattcagtgaaacaaaacagcacatcatctaggtttttggcacaaattagtgatcactttcagggctagatatttgcattctccttttgggtttactatgcacagaattgtggtttttgagattttacaagatgtgtctttgaaaagtgcttttagttaatacatgttgaattagtgaagcaaaacagcacatcatacattatttgtgtgccatatcttgcttttagcatttatggctgtatgtgcatatctttctggaagcactaacttggcttccaaactttattttctgagcctgtacaaaacgagtttttgaaaagtgattaatgtcaaaacatattaaattaagtgagaaaaacagcacatcatctaggtttttggcacaaagcttgcgtccacctttctgggctagacgtttgcattttctgtttgtgccacctaagttaaaaattgtgttttctgagatctcacaagatgtgtctttgaatactgttcttagttaatacatgttaaatttartgaaagaaaacagcacatcatacaatatttgttcgccacgtattgcttttaacatttagggctatatatgcatatctttctagaagcactacttgggcttcaaaatgttattttttgagtttgtacaaacaagttttggaaagcgatcaatgtcaaaacatgatacattcagtgaaagaaaacaacataacattttggtttttgggaaaaagcttgcatttacctttcagggatagaaattctcattttttctgagggcattttgtgctaaaaattgtgttttaaaaaatatttgacaatatgtgcccgtgaaaacagcccttagttaatatatgttgaatttggtgtaagaaatacagcatatcaaatattatttgtgtgctatatcttgcttttagcatttagggttgtatatgcatgtcttcctagatgtgatatatccaggtctaaaaactgaaagcaacctttgtgtgccaaagaaaaaaaacaaaaacaacaacaacaactgtataatgtgctgctttgtttcaccgaattcaacatgttttgcctgagaacagttttttaaaatttgttttgtacaaactcagatcaaacatttctgagccctgtaggccttcataggaagatatgaatttccaatcccaactgctaaaagcaaattttgggctaaaatactttatgacgtgctgttttctctaatagaattccacacatttttaattagaaatgttttcaaacacttgtttcatagaaactaaaaaatgacactcttgagcccagtgagatcccttatgaagataagaagattcggccttaaaaatggaaaacaagattttttccaaagaacttgatgatgttttgggtttgtttttgtttttcactgaattcagcatctttttacctggaacagttttcaaatacacattatgtagaagctcagaaaagacatgtctgagcccagtgggcactcaggaaaatacagatatccagccctaaagctaaaagcaagctttgtgccaaaaatcctttatgatgtgctgttttctttcactgaattcaacctgttttgatgtagagcagttttcaaagacttgtcttgtcgaatctcagtcaacacaattctgagtacaatggaccctcacagaaaatgtgaatatccagtcctaaaagttaaaagcaagatttgtgcctaaattcattaggatgggctgttttctttgaggaaattcatcatgttttcacatggaatcattttcaaacacaggttttgtaggccttcagaacagacatttatgaacccagtgggcactcatagcagaatatgaatacccagccctaatagctaaaagcaacctttgtgccaaaaaacttgatgatgtgctggctgggcgcagtggctcacccctgtaatcccagcactttgggaggccgaggcaggcggatcacgaggccaggagattgagaccatcctagctaacacggtgaaaccctgtctctactaaaaatacaaaaaattagccgggcgtggtggcgggcgcctgtagtcccagctactcgggaggctgaggcaggagaacggtgtgaacccgagagtcggagcttgcagcgagccaagatcgtgccactgcactccagcctgggggatagagcgagactctctctcaaaaaaaaaaaagaaaaagaaaaagaaaactgtattaagtgtaaacatattatctttttgtcaaagaatacagcccatcataaatattctgacacaaattttcttttagcttttacagctggatattcgcattttctttgagggcctagtatgtgcagaattgtgtagtcagagattcagcacaatttgaaaagtgatcaatgtcaaagcatgttgaattcatcaaaaaagatagtacatcatacagtatttgtgtgccatatcttgcttttagcatttagggctggatttgcataactgcataaaaaaactaactgggctcagaaatgtttcttctgagcttggaaaaaacacgtttttgaaagctcttcaaataaaagcctgttgaattcagtgaaagaaagcagcacattataccgtatatgtgtgccacatcttttagcattcagagctggttatgtctacctgcccttaaaggctaacttggctcagaaatgtttgctctgagcttgtacaaaacatagtttataaaaatgttcgagagcaaaacgtggaattcagaaaaaaacccctgcatatcatgtaatattttggcacaaagcttgctttttttttaatactagagctggttattcgtatctttctataagggctacatgggctgaagtgtgtgttttttagcttctatataatgtaggtttgacaactgttccaaataagaatttatttaatttagtgaaagaaaacagcacaacataattaatttaggcagaagtttgctattggcttttagggctggatattctaattgtctgcgagaacctagtatgctcagaattctgttgtctgatatttgaaaagatatgtctttgaaaactgctcttaatcaaaacatgttgaattcagagaaagaaaatagcacattatctaggtctttggcacaaagcttgcgtttaccttttaggactagatattcgcattttctttgtgggcctactatgctcagaattatgttttctgagatttgacaagatgtgtctttgaaaactgctcctacttaatacttgaattcagtgaaagaaaacagcacatcattcattatttgtgtgccctatcttgcttttagcatttagggctgcatatgcatattttcctggaatcaataacttggctccaaactgttttctttctgagcttgtacagaatgtgtttttkaaagtgatcagtgtcaaaayacgttgaattcagtgaaagagaacagcccattatctaggtttttggcacaaatcttgcatttacttcttagggctactcacatgttctgtatagctttactatgctcagaattgtgtttcctaagatttgacatgatgtgtctttgaaaactgctcttatacatgttaatataagtgaaagaaaacagcacatcaaacgttatttgtgtgccatatcttgctgccagcatttagggctgcatatacatatcctcctgaaaatgctaaatgggctttggaataaattttttcttagctagtaataaacgtatatttaaaagtgatcaatgtcagaacatcttgaattcagtgaaagaaacctgcttattatagacaattttgtctcaaagcttgggctgaatatttgtatctttctataagagctcactgggctcatacttgtttttttatcttctagaaaacgtgggtttgataactgttctaagttgcaatgtgtttaattcagtgaacgaaaatagcatatcataaaaatttttggcacaaaccttgttataccttttagggmtggatattcatatgcttctatcattctctgctattctcaaaatgtgtcttctgagcatcaacaaaacttgtgtttgaaaactgttctaagtmaaaaaaatggttaatttagtcaaagaacacagcccatcataaaatatttttgcagaaacctagttattaggttttaggtctgatatttgcattttctgtgagggcccactatgctcagaaaatatatatatatatatatatatatatataaaatttttttgagatggagtctcactttgtcacccaggttggggtgcagtggtgtgatcttggctcactgtaagctccgcctcccgggttcatgccattctcctccttcagcctcccaagtagctgggactacaggtgcccaccaccacgcctggctaattttttgtattttttcgtagagatggggtttcaccatgttagccaggatggtcttgatctcctgacytcatgatctgcccgcctcggcctcccaaagtgctgggattataggagtgagccactgtgcctggccgaatattttttttttgaaatttgacaagatgtgtctttgaaaactgctctacatcaaatcaggtagaattgagtgaaaaaaaatgacaaatcatctaggtttttaaaacatagcctgcttttagaatttagggttaaatatttgtattttttgtgatgtcctactatgtttagaattgtgtcatctgagatttgactagatgtgtcttggaaaactgctctttgttaatacatgttgaattcaatgaaagaaaacagcacatcatatattatttgtgtgccatatattgcttctagcaattagggttgtataatgcataccttccaaaaaagcactaactggcctacacaatgtttttttctgaccttgtacaaaatgtgtttctgaaaagtgatcaatatcaaaacatgtttccttcagtgaaagaaaacagcacatcatctaggttttggggacaaaccttgtgtttaactgtcagggtagatacttgcattttctgtggaagtctactttgctaagaattgtgttttccaagatttgacaagatatgtctctgaaacctggtcttagttaatacatgttgaatttagtgaacgaaaacagtacatgatacataatttgtatgccatatcttgcttttagcatttagggccgtatatgcatatcttcctggatgcactaacttggctttgaagagttattttctgagcttgtacaaaacgtgtttttcaaaagtgatcaatgtcaaaacatgttgaattcagttacagaaaacagcacatcatctaggttattgacacaaagctagcatttaccatttagggctagatatttacattttctctgtgggcttactatgctcagaattatgttttctgaaatttgacaagatgtgtcattaaaaactgctgatagttaatacatgttgaattcagtgaaaggaagcagcatatcatgcattatttgcatgtcatattttgctcttagcatttagagatgtatatgcatttcttactggatgtgctaattaggcttcaaaatgttattttctgaggttgtacaaaatatgtgtttaaaaagtgatcaatgtcaaaacatgttgaattcagttaaagaaaacagcacatagctttatggcactaagcttatgtttatctttgacagctagatattgacattttctgtgtaagcctactgcgctcagaattgtgttttctgagatttgacaatatgtgtctttggaaactgttcttagttaatacgtgttgaattcagtgaaagaaaccagcacatcatacattatttgtgtgccatatctttcttttagcatttagggcttttatgcctatcttccagaaagcactaactgggcacagaaatatttttttctgagcttgtacaaagtgtgtttttgaaaagtgatcaatgtcaaaacatgtcaaattaaatgaacaaaaacagcacatcatctaggtttttggaacaaagcttgtgtttaccttttagagctagatattcrcattttttctgtgggcctactaagttcaaaattgggttttatgagatttgacaagatatgtctttaaaactgctcctagttaatacacgttgagttcagtaaaagaaaactgcacatcatacattatttctgttgctatcttgctkttagcatttagtgctgtatatgcgtatcttcctggagatgctaagtgggctctgaaatgctttgttctgaccttgtatgaatgggtttttgaaaagtgatcaatgtcaacacatgttgaatttaatgaaagagaacagcaaataacctaggtttttggaacmcagcttgcatttacattttagagctagatactcgcattttttgtgtgaggctattatgctctgaattgtgttttttgagttttgacaagatgtgtctttgaaaactgctattagttaatacatgatgaattcagtgaaaaaacaacagcagatcatacattgtttttgtgccatgtcttactttcagcatttagggctgtatatgcctattttcctggaagtgctaactgggctccaagatgtttctttctgatcttgtacaaacgtgyttttgaaaagtggtcaatgtcaaaacatgttgaattcagtgaaataaaacagcacattgtctaaatttttggcacgaagcttgaatttacatttcagggctagatattcccgttttctgtgtggtcctactttgctcagaattgtgtttcttgagatttgtcaagatgtgtccctgaaaagtgaccttagttaatgtatgttgaattcagtgaaataaacagcacatcgtatattatttgtgtgccatgtcttgcttttagcatttagggctgtatacgcatatatttctggaagcgctaactaggctttgaaatatttttttctgagcttttacaaaacgtgtgtttgaaaagtgatcattgtcaaaacatgtttattttattgaaagaaaatagcacataatatagatttttggcacaaagcttgcgtttaactttcagggtagataatcgctttttctgtgtgggcctactgtgctcagaattgtgttttttgagatttgacgagatgtgtcttgggaacttctcttagttaatacatgttgaattcagtgaaagaaaacagcatatcatacattatttgtgtgccatatcttgcttttagcatttagggctatatatgcatattttcctggaagcactaacttggttctgaaaagtttttttctgaactcgtacaaaacgttttttagctggagaagtaggtgaaacagccattggaaaaaaaatttttttttttgagacggagtctcgctctgtcgcccaggctggagtgcagtggcacgatctcggctcactgcaasctccgcctcccgggttcacgccattctcctgcctcagcctcccaagtagctgggactacaggcgcccgccactacgcccggctaattttttgtatttttagtagagacggggtttcaccgttttagccgggatggtctcgatctcctgacctcgtgatccgcccgcctcggcctcccaaagtgctgggattacaggcgtaagccaccgtgcccggccggaaaaattttaacagtgagaaaatgatgacagttaatgagatttaatctacccaattatcatgttgcctttaacctccaactgcctttactcaatcctgggcttgtgtcgagctaacttggggagacatttagtttatagtttaaataaactaaacttttcccccaaattaactgcctttgtaaatctaacgagaggctgtcaggttgtgagcatgagagaagtctgaattctgctaaggtgtggacataaacagttaccagccattattccaaagatcacaagatttgcagcttctaattactcctgcagataacatcactgttgtagaacctaagactggttttttaatatatcttttcaggtttttgcattgctgaagactgacgacttcacccagacccaccaactggtcctgggacccccacccaggaacccattcagtgcaggaggacagcttcagctccctgtgtcttcacgtgtgacccaattgatcagcacttccctcttcctggccccctactgaccaaactatcctttaaaaaccctagtcactgagtttccagggagactaatttgactaataataaaactggtctcccattcagccagctctgcatgaattaaactttctctattgcattcccctgtcttaacaaatcagctgtacctgggcactgggcaaaatgaacccattggatggctacatatgtccaggttaatcccgtcatcactgggggacttgtgtaggggattttggctctggaaaggatggattagagatctgtgttctccagactgaagtgtgcagattattgccaagaaaaacctctgagaagcacaagctcaggccttggggacttcacgcatgttggttgcctgctgaataggaggctcctgtgtccaccctcacagcttggtcctcacttatatgagcccaactgggaatgctctctgtgattcaggtccacttacttctagaatgctcaggtaggaagtaatcattagaagcagatgaagtatgttaccccaggagcatagtagattagccattgacttgttttccccctgttggatcttaatcttccatgcaaattaatcaccaagggctcaaaaacagcccttggattaacatgctctgttcacagtcctggcatgttgggacccaagcccagtccctcatggggagggacttcactttcttttgctcctccccagtagccctcctattggtttggatacagctaccctgggtttggctcctgccttttccttcacagttgctacccaggaacagggaaaaaaggggtctgctattgatgatgttggtaacccccactgggtgaacctcactgggtgaacaggtcagccacacacgctacaaaaaagaagggcatctgcctcaacagtagagtgaagaaaggcagaagtctgctccttatgagctagcctccagggcatacaaagacattcttacacattcattcctttttgtattcactttttgaacatttattgggcatctgtagtatgctgggacattcattggttctgaagacatggagataaacattggggtactctgatccataaaacaaatacttctaaacctgcaaaaaacttagccacacactaatagtggggaacttcaacatcctactgacagctttaaatggatgattgtggtgaaaactaacaaagaaattctggacttaaacttgacacttgacgaatttgacctaatagtcttattgttttatccaaattaccactgtgtcccttttaagtagggcatttagaccaattacattgaaggttaatattgatatgtgggatgtttatcctgtcattgttttgtagactcaattgtgcagttgcttgatagagtcattggacgatgtacttaagtgtgtttttatgttagtagtactctatctaacaaacacagaatatacattcttctcatctgcatatagaacatattataagattgaccacatgcttgtccataaagcaactcttaataaatttaaaaaatagaaattagactatactctcagaccacagggcaataaattcaacaccaagaatatctctcaaaaccacacaattatatgaaaattaaacaacttgctcctgaatgacttttgggtaaacaataaaattagagcagaaataaaaaattctttcaaattaatgaaaacaggacagaacatgccaaaatatctgggatacagcaaaagcagtatcaagaggaaagtttatagtgctaaatgcctacaccaaggggatagaaaaaaatcacaaattaatagactaacattgcaccaaaggaactagatagacaagaacaaattaaccccaaagctagtagaagaaaataaataaaatcagagcacaactgaatgaaattgagatgcaaacatttgtacaaaagatcaacaaaacccaaagtttgttcacagaaaatacaaacagaattgatagtctgctagctatattaacaaagtaacaaaagggaaaaccaaaagaagcacaatcagaaatgacaaagatgacattactactgattccacagaaatataaagatcttcagactattattaacacctttatgcacacaaactaggaattctagaggaaactgataaattcctggaaacacaaacctcccaagaatgaatcaggaaraaactgaaacctgaactgaccaatcttgagttgcaaaattgaagcaggaataaaaaccaactaagcaaaaaaagtccaggattagatagatttacagctgaattctaccagatgtacamagaacagctgataccaattctactgatactattccaaaaaatagagaaactcctccttaactcatctatgaagtcagcatcatcctgatatcaaaacctagcaaagacacaacaaaaaaagaaaactacaggccaatatccctgatgaacttatacacaaagattctcaacaaaatattaatactagtgaacttaatctagcagcacatccaaaagttaattcaccataaaaatgtaggtttgattcctggaatcaagtttgtttcaacatatgcaaatcaataaatgtgatttaccacataaacattaaaaacaacacctataggatcatctcaatggatgtagaaaaagcttttgataaaattcaacwtcccttcatgttaaaaaccctcaacaaagtaggcatcaaagaaacatacctcaaaataataagggccatctgtgacaaacccacagccaacattatatggaatgggcaaaagctggaagcagtccccttgagaactacaacaaaataggattcctrttctcaccattccyattcagtgtcatactagaagtcctagccagggcaatcaggcaagagaaagaaatataaggcatccaagtagaaaaagaagaagtcaaactatttctctttattgatgatataattctatacctaaaaccctaaagacctcaccaaaaggcttctagaagtgatacacaacttcattaaatttcacaatagaaaatcaatgaaaatcaaaaatgaaaatcagtagcatttctatacatcagtaatgtatgacctgagagcccaatcaggaacacaatctcctttacaatagccacaaaagaagtaatgtctaggaatacatctaaccaaggaggtgaaagatctctataaggagaactacaaaacactgctgaaagaaatcatagatgacaaacaaataaaaaattccatgcccatggattggaagaattaaaattgttaaaatggccatactgccaaagcaacttacaaattctgttctatcaaactaccaatgctatttttcacagaattagaaaagacttttctaaaattcatatggaaccaaaaaagagcccaaagatccaaaacaaacgtaagtaaaaggagccaaactagaggcctywcattacccaacttcaaactatactgtaaggctacagtaaccaaaataacatgctactgttacaaaaacagacacatagaccaatggaacagaacagagaacccaggaataaagccccacactttcgatcatctaatcttcaacaaagtggacaaaaacaagcaataggggaaggacatcctattcaataaatggtgctgggatagctggctagccatacacagaagaaagaaactggaccctaccttttaccatttgtacaacaattaactgaagatgaattaaaggtttaaatgtgagacctcaaactaacagaatgctagaagaaaacttaggaaacactattctggacatcagccttgggaaagctaaggttaagtcctcaaaaggaattgcaataaaaataaaaattgataagtagatctaattaaactaaagagcttctgcatagcaatagaaactttcagcagagtaaatgtacagaatgggaaaaatattcacaaactatgcatccaacaaaggtcacatatccagaatctgtaaagaatttaagtaactgaacaagcaaaaaacaaataacctcattcaaaaatagtcagaatacatgaacagatacttctgaaaataatacatacaagtggcatagaaacatatgaaaaaatgctcatcgtcactgatcatcagagaaatgtaaattagaagcacaatgagatacaatctcacaccagtcagaatcactattacaaaaaagtaaaaacataacagatgttggtgaggttgtggagaaaaaggaacaacttatacgctgttggtgggaatgtaaattagtttaactactcaactactgtggatatcagtttgcagatttctcaaagaactgagaactaccagtcaatctggcaaccccattactaagtatatatccaaaagaaaaccaattattctaccaaaaagtcatacatgcactcacatgttcatcacaatactactcacaatagcaatgacatggaatcaacctaggtgcccatcaacagcgaattggataaagaaaatgtggtacgtatacttcatggaatactacacagccataaaaagaacaaaattatgttctttgcagcaacatggatgcagctggaggccattatcctaagcaaattmacacaggaacagaaaaccaaataccgcatattctcacttgtacgtgggagctaaacatcaggtattcatggtcacaaagatggaaacaaaagacattgtgggctactagtggggaaagggagggtggtggtgagggttgaaattctaactgttgggtagtatggttggtatttgggtggtgggtgtattcataccacaaaccttagcatcatgtcatttacccaagtaaaaacttgcacatgtaccctctgaatctaaaataaaagttgaaaaataaagagcaaataaaactgggccagggcagcaattcaaagcatgatagatagatagatagatadatagatagatagatagatagataaatagattaaaataaatctaaactacaaacttgtcttttcactatcttgataatgttcttttatggattctagtttttaattttgatgaagtccaatttatgtatttttcctcttgtttctcatgctttcagtgctatatctaggactccattgtcaaatcaaaggtcatggagatttatttctatgttttcttttaagagttttaacatttatgttaaggtttttaattcattttgagttaattgttgtatatactgycatgtaagaacatcacctcactcctttgcatgtggctatcattatcccagcaccatttgttaaaaagagcgttttttctccattgaattttcctggcaatgctgtgaaaagtcaattacccatagatgcttaaattaatttctggactctccattctcttccgttagtctatgtgtaaagttacagatctacccttgacccggaatgcctatcagaagctgatcaagtgcacacgttctgttcttatgataattacaactgggactggactctataatatttgactgtatagtgtcttccaaaattctttcttataatgtttcaccttgttaataaactcctgagcctaagaatggaaagaaacatgttttatactcacagtttcttaatttcgaaaactatcctgcatggactgatcactcaatttaggaagctggcgtaaggagcatttattagcattctgaacagggacctctgatctaagactctaagtactacagtcatttagtagtgaaattccattctgtgattggttcttagagaactagttttacaaaagcccaaagatacaagaaagttcacagaaaactgtttgtaatacttagaaattggaaccaataaaaaaaggtaatcagttggggatagatcattataaagcctccatatgaatgaattattcatgattatttaaaattgaaatatgtctgcagttacagaataagttgcatagtatgatccrayatgtatataaacaacatcatatatgtatgtgtgtgtgtatatatatatgtatatgggtgtatgtgtatatatttcaccttgtaatattttaccttgttaataaaaccctggaccaaaaaatgtaagttaaaggatttgtgtgtgtgtgtgtgtgtstgtgtgctcataaccaaatttctgcaggaataaagggaacgtttctatatgatgactttgcctttttaaaaaaaaaacaraaagcacatatatttaaattgtttaaggggaggtccatgctcttgacctttaaactaaattgccttaaaacctccygaagaattttctgtgttgtctgagaacagagctacaaagagccataacactttccaaagttagagacaaaatattccttttaagcttgaggggcaagcccctgggctcctaagcaggctgcctgtgaccctggatatgaatttcaggccagctccttctgccttttggggtctggtcagcctacctggattttatgttcttcagaaaatctttgaccttttccagggaaaacttcactatatcactatttgcaggtaaaactttgcttatattttagaacctctagaaagaatgcaactctgtatatactttgatgttattttattaaagtcaatttcagaattctgacctccagaactccaagagaatccacatttcctcatggatttgctactcagtttgtccaagaacttattgaggtgcacctcctggacctggcagtcactcccaaaacaagaggaagcagccatgaaccaccagagctcagagaacttgagtgacatacacagattctcctactggaactgaggtccagatgcccaggcaggcccagaactcatttttctacagatgagggcatcaaatctgcagtgcgctcacgctgtctgctccagaccttcaggctcttctgtctggaatgttcctccctgctcactttgcacacccaggacccagctcagatgggactcctcagggacacctacccacctggccagtcacaccttcctgtggcaccygctccttgctgtctcctcaccaatcatactcaaagcagatgctatggattgtgtttatttaccagctacaggagcattaacattttataattaatatttaatcaagtttagtaagctgtatttttgaggatatatgcagatagtttaaaatttcaaataaagtgttacaaagttgcttactggcataagctccagcaatttaatatgttcatccttttatttctaatattgtctattttcctgataaatcttgacagatgattaaccatttttattagtgtacttaaagaaatgttgatctttattgaactttgctggatttctgttacaatttttttatccatgattttttactagaaattcatatctactaawgtgtttggatttattctgaagactttttctaatatttctcagattagaaactcaattcactaatttacagtctttcttaccttctaatatatcatttataagtctaatatttccttaaatactgcttgtggtaggcagaataacagcatccaaaatatgtccatatagtaatagatactgatgcaatgtaatcacaatgggctaaaagtggaagacagaagcagagattcagagagatttgaagatgcaatattgctggctttgaagatgaaggagaggacacaagccaaggaatgccggtggcctctagaaactggagcagtcaaggaaaagaatgatcttttagaacatctacaaagaatgccactctgtagataccttgattttattttattaaagccaatttcagaattctgatctccaaaactctaagatactatatttgtgttgtttaagtcactggttatggtcctttattacagcaccgataggaaactaatgcactgcatttgttgtatccacaaatttatagttttaccaagtataacctttaaatattttagaatattcattttaatgtcttctttcatcatcggtttttagaagtttattttttctgtgtgattttatgtccaaatgaaggctatttttgtgacaattagattaaggttaaataatgtggtctgtgtgatgacaatcctatgacacatgcagcttaggatttcatcatttattctagatttaatgcatggkctactggacatatataaaatattagactttaaaataggaaggttgaaatattacataaactaaaagggcatcaagtttttattttttgctacttatattttacatacctttgttgatctttttttcaaaatgtctttgctcaaacaattactgagagagtgttagactcttttcatacaattgaattgtgccttttgtaaaaagaattcttctgagttttcttgtaatgtasaacatgtaaaatacatatagcctctttcacctgaaaagcagtrtrgtatggaagggcatagggacaaaaacacacaaacaaaaactttcaccgatatcattggaaccacagcaaaaacaaatacaaagcacctacygtatgcaggaaacctgctgggccctggggtacctgctccggctaatttccatgacaacccgaaagaccaggacacagatgaggagactgaaggtcaaagaggtgagrkcctgtggcaggtggcagaactagggctgaacaaggtttgcttgctccaaagcccaggttgtggggtggagagcaagggccacggaaggcctgtgccctcctcagagaagagtcccgctgctacctgccctctgcagcccacctgggttggcatcgtagaagcagcctctccccagccgcagcaaggccagcagggccagcacggggccatctgagtcctcaggagagggctaccagcagggacttgtgggcctcatmcaggtggccaccagggtgttggccaccagaaggtgcgatacgtcctccacatccaactcattggcagtgtggccagctggtgcaygccgtggggcttccctgtggggagagtgcctcaggatgggctggccccttccccacaccgcctcacctacccagctgattgggccacaggtaaatcctgtcyctatgcacctggcctgggtagcttccttcccacaggactgcagagacctgtgtccctttggagggacccccacgccatgccatccccagaacccacagctgcacttcccggtgtgcagccatcgaccctaccttcccctcaatctctccgtcgccctgtgggggaggcactttacagatgacagatttgaggttacatagatggtcagcagcagggctgaccctgagcagatcctgcatcagtttccttttccacaaaaatttggattagcaatatggccttgctggtctctggacccatgggtgtgtctgtaggcagaacaaggtaacacaggggctacaagtggcatgtgtctgtgtccacgtgggaatgttgggaatgctcatgaattctcactgggaaaaggagacagagcctcaattttaacaatttccagatacaaatataatggcctcaaatcacataaaagaaagaagaaagttcttcctcaccagcaaaccaaagccatacaaattaagcacctgggaggcagaggaagaatgtgagagtgtgtgtgtgtgtgtgtgtgtgtgtgtgtgtgtgtgtgtgtgtttggtggggtgggggctgacatcaatgatgaccccaagacatccccagtctcagtggttttaacattgctaaaactccttcctgtcatcttccagcagtcagaggacttactcatcgaaacagctgaggttggcaaaagaatttgcacccattaggttggcaaagaatttgcaaagtgagcatcagggctgggtggaggatgagaggtgaccagatggttagggggacagctcctaaagtcaaggatcctacaggtggcagtgctccctgatccaggagctctatatctgtctccatcttaaggagaaaacatcgtggagacaggatgtcactcatgatgtgttacaaccaagagcaaaaatctaggactctccaaaggaataacagcatgtgcacaggacgggccatggagctgccaggaaatataattagcaacaaaagggattttcatgatctgttgagtataaaaggatataaatggcatccacagcacaaactcaattttctgagatatattttatatgcacacacaaaaagaccagaaggaaatgtgagcagtgggagaatgggtaagtttcattgttcctttccatttctgagtttctaattttctgtggagaaaaagcccatgatacatcatggtatttgagagggaggatcctaaaatctaagccctggagctaaatctgccatcgatgctgggggaaatcactccaccactctgcctcagtttgctcacccataaaatagaaagaaacacatctttccctacctcaaaggagaccagaatgcaacagcagcccccatgcatgccctctggctggtttatgctcttcctgcgcagtagggctgtctatgtccacagcyttatgccctgtgccctctaaaaccctgagtcaggtctgagctggagcatcctgcagccctcctcctgcagcagccccagctggtttccaggcacataggccttggggcctgcacttcctcctccggcaacagcctccatgcagtgacacagtccagtgtgcccagaacacagtccggccagcacctgcagcagcccgaagctgcacagttacacacagctgtctgggtgtggcgccccctgttccaccacctcttggaagtcttcctggatgcaccaggaatttcctgctggccagcaacgtcctcggcctttgggtgcacctagatgaagtcctggagggtgctggccacatcaggaggtaggggcatggcagctgaatgcagccaggttgaaggcaatgggaggctggaagtgctcaggacaaggtgctggtccccccttggcagaggcaggccacgagatccttggctgacatcatgccgatggtcctgatagacccatgtccagtcctcatgacaccttggggacggagagtgcggtcaatgcacaggggtcagccagtccatacccccgtggccacccatgcccagcctcaagccacctcctgctctcccccagtgagaccccaggttcagtgtagatcccactgcatgaaaactggaggatccagtcgttaaggggcatttgtggtgctccctgagtaggtggtctccatggcctggggttggggtctaccaggcccactcccagcccactgtttacctcgtgggcctcagcttcctcctctgcagaatgggacgctgaccctgcccagcttagttccctctaagaacacctgacccctgagtgcccacatgggcagggtctgggtggcctgcggggttaggacccagctataggacccctacccccaccccttacccgtcccagcactgggccaagcaggaaggcagaactccccaaccccaaccagtcaatgcgggagccttctcagctggacccagggccacacctctgcccaccggctcacacctgggccatgcaaggcggggtggatgcacctgcctggcccttgagcgcgtgggggagccaccgttgcccacttgggaggctcagttctgaggtcgggattccaggcactcccttctcccccattccgaaacctcctgactggaagaactctctcggcacagccttttctttcagggtcccaaagtgcctgtgagcaggcagctcctgatctcctctgtgacacccacagactcaaagacacccatatgctcactcatgcagacaggcgctctcgcctgtggctctgaggctgagccggctttgccttggtgaaggacaaggccctggcgacccagattctctcgtgggtggctggggacagaagggcggtggcgcgctgggctggctggagggctcaggctccggcgcgagtcctgcaaggatgctgcctccaagtgtgcttgtgggtggcggatcccagggcctgccgggagagtgtscactcctcaggaggcctggctgctcagcggcgcccctctgtggcgagactcgcccaggcccatgtccggcccatctcgccccagccaggctcccctgggcagcctcaggacagagaaccctgaattcagagggaggctggaggtgtggggcctctaggcacttgcagggtggagctaccccacacccagggctcaccctcagacctacccaggcgtctccagcctcacgctcccagaggtaaggaaggggcttcaggaaggtgggggctacctccccgcccagtaccgtcaggctctgaattcgtacctgggaactctgccttggctgacttggggaccccttcactgctcagccttcccctctcttcctgccgggcggtccacctaagctccctgactcttcccacgcggccctgggtcccctccccacaggctgttccctgcacccgcgggtgggactggacctttccctgcacgtccagtctgtttcccgcggtcttcctccgtctgaccctggcagcccgctcctctggccccgggctgtgtggggaccgctttcccccaggcccgtcgtcagtgtcctgagctccgccgactcccgcccattggcgtcgcaggcctggtgacaagctgtcgctggcatctagggctcctgggactcaggcacatggagctccctcggggccaaatttgtgtcacgcgcagggacaccggaggcgcgtgcacagtccgtgtaacggctttgcttggcgcgtctccgtttctcttctgaggggctgagagtcgcggagtttcctagttggaggctgtggcggacgcgatttgcttcctcatatagggttccggaggcggcgaaaagtccagcgggtctccgaagccggtagacggagccatgaagaagacgtcgggcttcaggagggggaagggcgggctgccctggggctcggtcagcagccccgggaaggtgggcgcgggcgccgggagtgagagtgcggaccacgcctcctcccagcccaggcgccacgacccggacaaggggttcgacaggctccgcagagctgccggccgacaccggacagagacgatgcggcggatcctttctctgccgaagagtggcgtggatgacagagacgagaagaacaggtaataggaactggagcccggcaggggagggaggagggcgggtcggggagaggccccctttcctgctctcggctcacccctgtccccgagggcgctgggctttgttccctctgcagcccgcagcacccggtgtggcaacctcaaggtcatcattatgagcagcgcgatgaaaacaaaactttagctggtccgatcctctcataattcccgttactttactgaaagttttagtgctttaactaaaaaaaattaaacatacctagctttttttttattgtacacattttaaacaatgttatatatgctgtggaaacaagcatcatgagaaaaataatttctatattatattaacttctgggctaaaaattctttggataaaaatctaatatcccttttgtatccacctacacctgagtaataagttatttcatgaatgacctcagaaggatcctttgaagtgagagcatggttccctgttcttgaataggaagactaatctttccttctttctttctttctttctttctttctttctttctttctttctttctttcttctttctttcttccttcctttctttctttctttctctctttttcttttctttccttccttccttccttccttcattccttctttctttcttttttttttattatacctgaagttctgggttacatgtgcaggacgtgcagttttgttacatagctataacacgtgccatggtggtttgctgcgctcctcaacccatcacctacattagctatttctcctcccctagccccccaccgcccccgacaggccctggtgtgtgatgttcccctccctgtgtccacgtgttctcattattcaactcccacttatgagtgagaacatgcggtgtttgcttttctgatctcgtgatagtttgctgagaatgatggtttccagcttcatccacgtccctgcaaaggacatgaactcatccttttttatggctgcatggtattccatgtggtgtatagatggtgccacattttcttaatccaatctatcactgatggacatttgggttggttccaagtctttgctattgtgaatagtgccgcaatatacatatgtgtgcatgtgggaagactcatttttctcaagatgtgaactcttcattttagataaaccaaataaaaacatcatggttttaagatttttgggttacatatgctaccttttactgttatgatgacattaagaaaatttttgtaaaagagcaaagacttgccctttgatatatcaaagtgtgatattaagttccatttgctaaaagatgagaagacagataaatgtgyggaacagaataaaaaatgcacaaacactgaactatatgtaaaattttagaacctgatcctgatgacatttcatatgtgtatgaaaagatgagttatttgtaaatgaaatgtctgttaaccggagaaaactagctagatttgtacattacaaaaataagttattgatagaatatgcataaaaacttatacaaaattagaaaatgccagaatagaacacgaatgcctatttatacagatacatttttatgttgacaaagaccttcctatgaatgcattctgcaggttgatttagaaaacaaaaattaaaactccccttacatcagaaaaaaattaacaaaagacaacatacttgcaaaatagtcacattatatacataaatatagacatatattatttgcaatgaaaaatgtattttccttttacagagaatttttttaaagaaataggaactataatttaaaattggtcaaagtactttttccagatctactagtgatctggaaaatcagtagtacttataccagtgcttaaagtttaagttactgttaactttttaaataaacaatttggtggcgaacatcactctgaaaaaggcatgtattctttactcatgaattccgttatactaaaatattttcaggaaataattagagatgcatacaattcatttttctcagcactgcttccaatagcaatgtattaaggagaggacaaataaaggattttataaataaatttcagtgcatccataggatgaaattatgtgtaactactgaacgtagcaatagacatggatgtatgttgacatgggaagatgtactttggtatatgaggtgagaaaaaatcgatttgtttatacaaacacacaaacagaatggtcttgtggtagccaaaagtatacacaaaatgtgataaaattttgttattttgggacatttgtattacaggtgatttattttcctttttcttattgtgatatccacaatgagcatgtataacaggtttagtgaaagtttattattactgaaataatcctaggtaagaacaggaatatgaaacttgaacagataaaaataagttcttgctttctattaatttttttttgtggattggtatcttctgccaaggtttagcctcttcagaaatagagggactcttttaatctgtgctggtagattgtattgtgtatactctttatcatatacatgtcttttattatggatagatttattacatacatgcaaacaattataatttaataattttattttagtggtgtccttatgaaaataaaaaatagcaaatataaatcatttctattgcacaaatgttacttatctttactagttttctgtaaaaatattgaactcctcaaatatatttacgtagtcttttaatccatttattcaccaaatgtgacctgaatacccactgtgtattctactctctctcagaacctttccaagcttaaaaaatttatgtttacctacccaatttgagcaagttgagagaattaaaattggactattaggacttaatctaagttgaagcttttcctccctcctttcaaacaaaagcatttctgaaggtagaaagttgtaaaagataaccttgaaactatccttttgaaaatttataacagtgtttctcttttcttaatttcaacttttatttgagatacagagggcacatatgcagatatcatacatgggaacattgagtgatggtgaagtttggaggacagatsgcatcactcttgccatgagcatagtacctggtagtagtaatttaacccactcccttatagaagtcttaaagactaatattaatcattgataatatctgatttacwtatatcatataaatcaaaatattgaataaaatgagccatgcttattcatttgaattttgatgtttctttggcctaaagttttctgaaagccaagtaagaatagttttttggtaaaaatgtgtcattattatctcagccgttttttttcgctgttcttttttgggttgtcttcctattttttatttctatgggtacatagcaagtgtacataatatatttataggtacatgaggtattttgatacaggtatacaatgcataattatcatatcagggtaaatgggtatatctgtcccctcaagcagttactgttctttgtgttacaacattccaaatatactttttggctattttaacatgtacaataaattattattattattattattttttgagatggactcttactctgtcgcccaggctggagggcagtggcgccatgtcggctcactgcaagctccgcctcccgggttcacgccattctcctgcctcagcctcccgattaactgggactacaggcgcctgccacaatgcccggctaattttttgtattttttagtagagacggggtttcaccgtattagccaggatggtctctatctcctgacctcgtgatccgcccgccttggcctcccaaagtgctgggattacaggcctgagccaccacgcccggccaataaattattgttgactatagtttccctgttgggccatccagcgctaaatcatattaatcctatctaaatatttttgtaccagttaaccatccccacttccaccctcccccaatctcaatacctttcccagcccctcctaagtattgttctactgtctatctccctttgttcaattgtttcaatttgtagcttccacaaatgagtgagaacctgcaaactttgttcttctgtggctggcttattttacttaacataatgtccttcatttccatccatgttgttgtaagtgtcaagatctcrtttttttatgcctgaatagtactccattgtgtctatgtaacactttttctttaccctttcttctatggatgaacagttatttcccaaatcttggctattgggaataatgcttcagtaaatatgaatgtactcatagttcttcaatatactgattgccytcccttggggtttatacctagcagtgggattgctagatcatatggtaattctattcttagtcttttcaggaacttcaaarctattctccaaggtggttgtactaattcacttgggtggtggggaacgtgtctgtactggggacagatgactgagactacacgtagtttgtttaccggaaggagggaaatagctcctactcttgatcatttgaacccattttttggaatgggtgctttcatacatggaagacttcaatgttggagactgtcattgagtcctagagggatctgtaagtaggagcccataggaaagaagawcttgagatagcaattgggaaaaacagagatacagctttcaggactctatttttccagcagtctctctccttgggtatcagagcatctgtgaagattctcaagggcttgctagttgatgtggacctgaactaggcaggacctacgcagggaacataattaaagtttatctttgctaaggttttaatctttctgcaaagcatatttccaataatgacatagacacttgttcctttaactttcgtacattgagctgtcaagcatttcagacatttcagcgaactgcctacactgttttagggtaaagggcagcaatagggcctacttaagtggtttccatgctgaagaaccaagactgccatttttgagtggcacagattagcctttgaaccagagacaggtaatggagaagacacagtgtctctttcttaccttgttttaagtgatcaattggttccaattcaggtaacaaaggttatgtcactcattaattggatattgaattcagccttcaggacagacacttctgaagacaaattattctcaggctctgccaatatattgctggtcactatttgttaaggaactaagggtgagtcttcattgaacatttcatagattgggaaaggtggaggcagaaataggtaactaaaatctttttgaaaaagaggccgattttaattatattaaggaatattatctattgtataggtagctgacctttccccagattttgtttttgtttttgttttttttggtggggggtgatacccagacacaaaacaaataatttttttttttaagagaagtgaactcactcatttttcttgtatgtttttatctttaggctgtccaacgaacagagttctggtgactcatggctttcaatagatgatgaactctttgattctggtaccaaggtaaagtgctcttttgtgaaataaattttcttgctctgaatctagttttgcacagtatttactcttcaactgtggcagcggtctacctataattgttttacagtcttggggaatagttggtcagaaaaaaaacatattatagaaatatgactatttgaatttcctttacttttttctttggaaaatgggaaagggtgctaaatacttagaggaattgggggctgaaaaatggcatgaactgggaaatacatagtgacaggaaaactgtatgtggaaaagctttcccacagtagaggaaacttgaaatttggtcagggtttatttggtgagtattctcacaggaacttttcagtcatactattgtgatctttataatccatgtgcttgaataccttttaatgggttcaattactcattatagtaaccatagaatgtccccggggtctttcagttccaaaacagtaaagcacatatcatatggtttccttttactttcttggatgcttactgtgggatgacacagtttttagtaggaaactttttctctctttggtccttggttctgtaattagactccaataacattgtggacatgtagctgggcatgctggcacatgcctgtagtcccagctctttggaaggctgaggcagtaggatcacttragtccaggagttccagaccagcctgggcaacataagaagacctcacctctagttttttttttttaattatactttaagttttagggtacatgtgcacaacatgcaggttagttacatatgtatacatgtgccatgttggtgtgctgcacccagtaactggtcatttaacattaggtatatctscaaatgctatccctcccccctccccgcaccccacaacaggccccggtgtgtgatgttccccttcctgtgtccaagtgttctcattgttcaattcccacctatgagtgagaacatgcggtgtttggttttttgttcttgtgatagtttgctgagaatgatggtgtccagcttcatccatgtccctacaaaggacatgaactcatcacgttttatggctgcatagtattccatggtgtatatgtgccacattttctcaatccagtctatcattgttggacatttggattggttccaagtctttgctattgtgaatagtgccwcaataaacatacgtgtgcatgtgtctttatagcagcatgatttataatcctttgggtatatacccagtaatgggatggctgggycaaatggtatttctagttctagatccctaaggaatcaccacactgacttccacaatggttgaactagtttacastcccaccaacagtgtaaaagtgttcctatttctccacatcctctccagcacctgttgtttcctgactttttaatgatcgccattctaactggtgtgagatggtatctcattgtggttttgatgtgcatttctctgacgtccagtgatggtgagcattttttcatgtgtcttttggctgcataaatgtcttcttttgagaagtgtctgttcatatccttcacccactttttgatggggttgttttttttcttgtaaatttgtttgagttcattgtagattctggatattagccctttgtcagatgagtagatgcaaaaattttctcccattctgtaggttgcctgttcactctgatggtagtttcttttgctgtgcagaagctctttagtttaattagattccatttgtcaaatttggcttttgttgccattgcttttggtgttttagacatgaagtccttgcccatgcctatgtcctgaatggtattgcctaggtcttcttctagggtttttatggttttaggtctaatatttaagtctttaatccatcttgaattaatttttgtataaggtgtaaggaagggatccagtttcagctttctacatatggctagccagttttcccagcaccatttattaaatagggaatcctttccccatttcttgtttctgtcaggtttgtcaaagatcagatggttgtagatatgtggcattatttctgagggctctgttctgttccattggtctatatctctgttttggtaccagtaccatgctgttttggttactacagccttgtagtatagtttgaagtcaggtagtgtgatgcctccagctttgttcttttggcttaggattgacttggcaatgcgggctcttttttggttccatatgaactttaaagtagttttttccaattctgtgaagaaagtcattggtagcttgatggggatggcattgaatctacaaattaccttggcagtatagccattttcacgatattgattcttcctacccatgagcatggaacattcttccatttgtttgtatcctcttttatttcmttgagcagtggtttgtagttctcctggaggaggtccttcacatcccttgtaagttggattcctaggtattttattctctttgaagcaattgtgaatgggagttcattcatgatttggctctctgtttgtctgttattggtgtataagaatgcttgtgattttgcacattggttttgtatcctgagactttgctgaggttgcctatcagcttaaggagattttgggctgagacaatggggttttctagatacacaatcatgtcatatgcaaacagtgacaatttgacttcctcttttccyaatcgaataccctttatttccttctcctgcctgattgccctggccagaacttccaacactatgttgaataggagtggtgaaagagggcatccctgtcttgtgccagttttcaaagggaatgcttccagtttttgcccattcagtatgatattggctgtgggtttgtcatagatagctcttattattttgagatatgtcccatcaatacctaatttattgagagtttttagcatgaagtgttgttgaattttgtcaaaggccttttctgcatcaattgagataaccatatggtttttgtcattggttctgtttatatgctggattacgtttattgatttgggtacgttgaaccagccttgcatcccagggatgaagcccacttgatcatggtggataagatttttgatgtgctgctggattcggtttgccagtattttactgaggatttttgcattgatgttcgtcagggatattggtctaaaattctctttttttgttgtgtctctgccaggctttggtatcaggatgatgctggcctcataaaatgagttagggaggattccttctttttctattgattggaatagtttcagaaggaatggtaccagctcctccttgtacctctggtagaatttggctgtgaatccatctggtcctggactttttttggttggtaagctattaattattgcctcaatttcagagcctgctattggtctattcagagattcaacttcttcctggtttagccttgggagggtgtatgtgtcgaatttatccatttcttctagattttctagtttgtttgagcagaggtgtttatagcattctctgatggtagtttgtatttctgtgggatcggtggtgatatcccctttatcattttttattgcgtctatttgattcttctctcttttcttctttattagtcttgctagcggtctatctattttgttgatcgtttcaaaaaaccagctcctggatttattgattttttgaagggttttttgtgtctctatttccttcagttctgctctgatcttagttatttcttgccttctgctagcatttgaatgtgtttgctcttgcttctctagttcttttaattgtgatgttagggtgtcaattttagatctttcctgctttctcttatgggcatttagtgctataaatttccctctacacactgctttgaatgtgtcccagagattctggtatgttgtgtctttgttctctttggttttaaagaacatctttatttctgcgttcatttcattacgtgcccagtagtcattcaggagcaggttgttcagtttccatgtaattgagcagttttgagtgagtttcttaatcctgagttctagtttgattgcactgtggtctgagagacagttcgttataatttctgaggagtgcattacttcgaactctgtggtcaattttggaataagtgcagtgtggtgctgagaagaatgtatattctgttgatttggggtggagagttctgtagatgtcagatgtctattaggtccgcttggtgcagagctgagttcaattcctggatatccttgttaactttctgtctcrttgatctgtctaatgttgacagtggggtgttaaagtctcccattattattgtgtgggaatctaagtctctttataggtctttaaggacttgctttatgaatctgggtgctcctgtattgggtgcatatatatttaggacagttagctcttcttgttgaattgatccctttaccattatgtaatggccttctttgtctcttttgatctttgttggtttaaagtctgttttatcagatactaggatggcaacccctccctttttttgttttccatttgcttggtagatcttcctccatccctttattttgagcytatgtgtgtctctgcatgtgagatgggttttctgaatacagcacactgatgggtcttgactctttatccaatttgccagtctgtgttttttaattggagcatttagcccatttacattaaaggttaatattgttatgtgtgaatttgatcctgttgttatgatgttagctggttattttgctcattagttgatgcagtttcttcctagcctcgatggtctttacaatttggcgtgtttttgcagtggctgataccggttgttcctttccatgtttagtgcttccttsaggagctcttttagggcaggcctggtggtgacaaaatctgtcagtatttgcttgtctgtaaagtattttatttctccttcacttgtgaagcttagtttggctggatatgaaattctgggttgaaaattcttttctttaagaatgttgaatattggcccccactctcttctggcttgtagagtttctgcctagggatcagctgttagtctgatgggcttccctttgtgggtaacccgacctttctctctgactgcccttaacattttttccttcatttcaactttggtgaatctgacaattatgtgtcttggagttgctcttctcaaggagcatctttgtggcgttctctatatttcctgaatttgaattttggcctgccttgcaagattggggaagttctcctggataatatcctgcagagtgttttccaacttggtttcattctccccgtcactttcaggtacaccaatcagatgtaggtttggtcttttcacatagtcccatatttcatgaaggctttgttcgtttctttttattcttttttctctaaacttctcttcttgcttcatttcattcatttgatcttccatcactgataccctttcttccagttgatcgaatcagctgctgaggcttgtgcattcgtcacgtagttctcatgtcttggttttcagctccatcaggtcctttaaggacttctctgcattggttattctagttagccatttgtctaattttttttcaaggtttttaccttatttgccatggattcgaacttcctcctttagcttggagtagtttgatcgtctgaagccttcttctctcaactcgtcaaagtcattctccatccagctttgttccattgctggtgaggagctgcattcctttggaggcggagaggcactctgatttttagagtttccagtttttctgctctgttttttcctcatctttgtggttttatctacctttggtctttgatgatggtgacgtacagayggggttttggtgtggatgtcctttctgttttttagttttccttctgagtcaggaccctcagctgcaggtctgttgaagtttgctggaggtccattccagaccttgtttgcctgagtatcagcagcagaggctgcagaacagcagatattggtgaacagcaaatgttactgcctgatcattcctctggaagttttgtctcagaggagtacccggccgtgtgaggtgtcagtctgcccctactagggggtgcctcccagttaggctacttgggggtcagggacccacttgaggaggcagtctgtcctttctcagatctccagctgcatgctgggagaaccactactctcttcaaagctgtcagaaagggacatttaagtctgcagaggattctgctgccttttgtttggctatgccctgcccccaggggtggagtctacagaggcaggcaggcaggcaggcctccctgagctgcagtgggttccacccagttcgagcttcctggctgctttgtttacctactcaagcctcggcaatggtgggtgcctctcccccagccttgctgccaccttgcagtttgatctcagactgctgtgctagcagtgaacgaggctccgtgggcataggaccctccgagccaggtgcaggatataatctcctggtgtgctgtttgctaagactgttggaaaagtgcagtattagggtgggagtgacacgattttccaggtgccgtctgttactcttttcttygactaggaaagggaattccctgacctcgtgtgcttcccgggtgaggcaatgccttgccctgcttcggctcacactcggtgtgctgcacccactgtcctgcacccactttccaacactccccagtaagatgaacctggtacctcagttggaaatgcggaaatcacccatcttctgcatcactcatgctgagagctrtagactggagctgttcctatttggccatcttgrctctgtagggtccagccccacagggtcggtgggtttctccccatgtgtggagatgagagagtgtagaaataaagacacaagacaaagagataaaagaaaagacagctgggcccaggggaccactaacaccaagacgcagagaccggtagtggccccgaatgccaggctacactgatatttattggatacaagacaaaggggcagggtaaggaatgtgagccatctccaatgataggtaaggccacatgggtcatgtgtccactggacaggggcccttccctgcctggcagccaaggcagagagagaaaggagaaagagagaaacagcttacattattatttctgcttatcagagacttttagtactttcactaatttgctactgctaactaaatggcagagccaggtgtacaagatagaacatgaaggcagactaggagtgtgaccactgaagcacagcatcacagggagacggtcaggcctccagataactgcgggtgggcctgactaatgttaggccctccacaagaggtggaggagtagagtcttctgtaaactcccccggggaaagggagactccctttcccggtctgctaagtagcgggtgtttttgcttgacactaatgctaccgctagaccacggtccgcttggcaacaggcgtcttcccagacgctggcatcaccgctagaccaaggagccctctggtggccctgtctgggcataacagaaggctcgcactcttgtcttctggtcacttctcactatgtctcctcagctcctatctctgtatggcctggcttttcctaggttatgattatggagcaaggattattataatattggaataaagagtaattgctaccaactaatgattaatgatattcatatataatcatatctaagatctatatctggtataactattcttgttttatattttattatactggaacagctcgtgtccttggtcttttgcctcagcacctgggtggcttgccgcccacaggctccacccccctagtttttcttttaacatggaaattcagaaatttaaaatttctgtctcaaaatctgtattacaaagagattcccatgtgtttcctaagccattctatgaagaatatatttaaaactcttcatctaattgagcatacacgtttttcctcaagtaacaaccagctccagaagcagagactgttaataaccatgtggtaagactttaatttcaaacactttttgccctgtattataaaaaatattcacagagcatctttgtatcatagtttaaagtwtcaaatttcagaagtttttgtatttcattgtttacataatcattttaaagatcctgcacyactgtgagctactgaatgttacgaaacatattcttgtgtatcctaatgtacctaaggtcttgcatgtaagaagtgttttaatcatttttgaacatgaagaaatgagcagacaagtaaatttctatataatagaatgttataggtagtataacatgcacaagatatctaataataagatctatcgcatttccaaaatggggcttaaattaatgtttaggatataagttcacatgaattatgcaaatatgttataaataagaaggaaataaattagaaatatgtcatcagtaggaaagcagattacagtatattttctaatatcctctaactgtaagctcagatttggattttagatgaaaatttcttaagctttcttttagccccaacctatgctcttttaaatatatcttttcaggttgtatgttactctttataattttgatttcctatgatttctcctrgtggaatattgatgaaacatttcttttctcttttatctctctgtagtaataatgttccagctttcacatagtggtagatgaccatgtttacctgaatgaatgtcttattttgtagaaagaaaattgaagtctttattacagaaatacttacaaaaaaattgtaaattctaatcagtatttttasggctatcctatgaccaaaagtctccatatagatctgtacttctccatgtaccttactgtagttaatatmataagaatgacaytcataaatattatctcctaagtatgtctaatgaaaaaatttgggaagaaatgtgaaatccttttgtaaactgtgaagtgtgtatacaagtgtaggacaaaatgatcacggtgggattcagcgatttagtaaatattgaagattctttttgtaaacctgaacaatgaaatggcagtagtgtcgaaaaaaaaaaatagaaatttagaacaggcatgtcgatttctactttggtttatgttaagtttcagcagactatgactgggaatatcctaagggaatctagtgatttggcacttgagacctttctgatgagattgtaagtgtttttgaccttggaagaatttctgttcttgactcctgactgtgtgctaggcagtgagacactgaatgtacaagatgaggcttatgatagagtagtaagagcagaaaatcaagtaaagaacaaacacttctaagtcactataaatgcttcctataaagaaaacagagaatgttaggttagggcacattgaagaagtgcgtagttaggatgggggccggaatgggagtagaactgtgttctcagagaagatctttctgagtgtgacatttaagctaccaactagaggacaagaagcagcgagccatgtgaaagtctagaaggaggatattctggacagagagaacaatgggtcacatctgtttttcattttgttctcaacatccaaaaagcaggaagtacggtaagcatcctcgtcctcatrtgtattattagaatgtgtagaaaagagaatgtgtaaataagggcctgggactgtttagatgcttcataataaatgttcctctccttccctttttactaactcttgctatactttcttgaagttatttcttaattgggaaagaatggcatactatatctaatatttgcttgcttttatttaaacaaggcataaagaaaaggcttcttactattttgccatttttcctgtcagtaaaaattttaccaaaaatattttgagttttccaagcccttcctcacctaaataaagcagctttgacaatgttctgcttacactcaacgtaacataccctgaagttacctatcatgccgagtatcttattttaacactaagatcatttatgtaattagaaatattttaaatatgaatgttgtaagtattataccaattgtgtgtgttttttttaatgccctgttattgttggtagtgaacgcaaagttgagttaggtgtttgaagttagttccttgctgacatatacagaagagctaatattgtatctgtgactatgtttcctttggctttctatgttcagtttacagagtcaatagccatatggagataaaatatttgcttgatctggagaacatatatgagtttctctgttgaaatattttggttttcaatacatgctttccttacttctaggtctcattgcttttaaatcaggaaattcagaacatgtttaggaaatattgagaaattcattgttttttcactgaaactcattattcattataatttcaacagactacctttgagaatgttccacagaaatatgatagtcrcttaactggagctgatgatggtcaaagaggaaaaattacaataaaggaacaagaaggtaagaactgtattttatttaaaaatttgacagaatgtttaaaaacatgagctctgttatgttctagtagccaaggaaaataaggtattaagtgcatagtcaaaaaaagagaagtgaaatagtgatatgttgtatattttgtaaggcattagcaaccaatttaattgagagtgccactaaaggagctgaatcattagttccaattcaagatactgtaagacctgaggaaagtcagaaaataaggaagaagaaaagagtaaatgaaggaatgaagagtgaaaaggcggagagtacagggagtaaatgagggaaaaagatatatgcaatgaagggcgatagagtaagataattatttgaggagaatataaagtgagcttccagtaccgaaacttgtcagagaattcaagcaaaatgttgccactcttgctgttttccttacttttgggaatgcattaaggatggaggtacctgaccacacagagctatgtttcatctgcgatagaggaatgtaatgtatggtcagccgtgcataaattacatgtctataatttaatgtgctataaaatcttgttacttcatgggacagtatcttaggggccaaaagaagagcattggaaagaagagggtaggattaattatggaaagatcaaggaagytatagcctgataaaaagttcattagtaactttacgacttgtaatgcagcttagatttggaggacgtgatagggtggagcttgaggctggattccaaaagggcaggttgaggttaactaatgtgggagcacactcagtatagaccagagcttcccaaattttaacaaatcagctgaggaccttgttggaagtgcagattctgattccacaagtctgcgattctgtatttctaataagatctcaggtgatgccgacccttcttgtcctaggaccacactctcagtagcaagggtatagctgtgccttcagagaaatctcgaagaagagcccttggatcaccactcaagacataacaggatcaagggaaagcatgattttccytttatttctgagcgtgtctctggccagaggggaaggagaaagagatgaagaaacagaaatcatcattggaagatactactgctaaatgaagagaagagaagtcatgggaatagtccatcaaaaggcggcagaaaggtcagaatcaggacaacagatctagagactacttttgcaaaggaagagggattgtgagtggaggaggagggaggaaagaaagaagttggctagttaattttggagttgataatagggaaacttgagagctgtcacttctagtgactgcaatatattggcactcaaacagaagattaggtgattgctgttccaggaattactggaaggagggagtgctagaatgggggtaaaccacaggaactaatttcttctctctgtaactatcagacatcaaagatgcatgttttgttgatattgtgtccggaattggtgggttcttggtctcactgacttcaagaatgaagccacggaccctcgcggtgagtgctacagctcttaaggtggcatgtctggagtttgttccttctgatgttcggatgtgttcggagtttcttccttctggtgggttcgtggtctcgctggctcaggagtgaagctgcagaccttcgcggtgagtgttacagctcttaaggcagcacatctggagttgttcgttcctctcggtgggcttgtggtctcactggtttcaggagtgaagctgcaggtcttcgtggtgagtgttacagctcataaaaacagtgtggacccaaagagtgagcagtagcaagatttattgcagagagtgaaagaacaaagcctccacagtgtggaaggggacccgagcggattgccactgctggctggggcagcctgcwtttattctcttatctggccccacccacatcctgctgattggtagagctgagtggcctgttttgacagggcgctgattggtgcttttacaatccctgagctagatacaaaggttctccacctccccatcagattagttagatagagagtttcaacacacaggttctccaaggccccaccagagcagctagatacagagtgtcgattggtgcattcacaaaccttgagctaaacacagggtgctgattggtgtgtttacaaaccttgagctagatacagagtgccgactggtgtatttacaatccctgagctagacgtaaagattctccaaggccccaccagagtagctagatacagagtgtcgattggtgcactcacaaaccctgagctagacacagagtgctgattggtgtgtttacaatcccttagctggatataaagactctccatgtccccaccagactcaagagcccaactggcttcacccagtggatcctgcaccagggctgcaggtggagctgcctgccagtcccgcgccatgcgctggcactcctcagcccttgggcggtggatgggactgggcgccgtggagcagggggcagcattcgtcggagaggctcgggctgcacaggaacccatggaggcgggggaaggcccaggcagggcgggctgcagtccagaggcctgccccgtgggaaggcagctaaggccctgcgagaaatcgagcgcagcgccagtgggctggcactgctgggggacccagtacaccctccacagccgctggcccaggtgctaagcccctcactgcctggggccggtagggcccgcccgccgctctgagtgcggggcccgccaagcccacgcccacccagaactccagctggcccacaagcgccgygcgcagccccggttcctgctagcgcatctccctccacacctccctgcaagctgagggagccggctctggccttggccagcccagaagggggctcccacagtgcagcggcgggcygaagggctcctcaagtgccgccaaagtgggaacccaggcagaggaggcgccgagagcaagcgagggctgtgacgactgccagcacgctgtcacctctcaatatgagttaatcaactgaggtaaagttaaatgtaggagctttggctgctttttctttaaggtagccggttttttaaataggatgcctgttttgtaaaagtttatcatggatgacatgatatgccaacccaaactaagtttggaamcaaaaaaaattacaaagtttattcctcaaatacaaaaggcattactttacataaatattacacccattttggtatataaaagctcagtagtaactaataattgtgtagcaatgcattttttattaatatttcaatgttgaaagcttcttagacattatttttagacatgttttatataccttcttgcatgagtggatcaaaaaatttaagatggctaaactacgggatataagaaatgtaggcctatcagtaagctcaagtaggtatgaaaaaaatgaagatttttatgaactattttgtgtaagtgtggatccaaagcaattcacacttgtgaaagtgtggatccgaacactttctctgatgagaaatgaattaaacattcaaatgaactgtcatgacaactgtgtgcttcctacattctaggaccaattgaaggacatagtaggtacttgtagtagaatggtataaatgattctgatgtgtcacattaaagacacactatagcattctaccatcagctttgacatttatctgcccagggtcatgatttgctcctctggttaaagatcatttttctcctcctcagcatgtacacatggttgcgtgcatacttttctctcagttacagatattcgaatcagaatcttgcctttgaaatgttaactgcatgttttattcaacctatcttcttagttttcttcaggatatttctgtcatgttgttgtcctgacaaaagaaatgcacccctaaatctaaactcattatttttaaaacgaagcactaagattcagcttgatactaactctgagtgtatggttagatttatcatatttatatataattgattatatgtcccttttgccttccagattctcttcagcaatatcatcacttgaaggtaataacttttctatatttatctttaattattaaccacatagtatatgaaatatatattacttattaatcattttgtcttaaaaccctttcagcctaaggttgaaatgaaagagtgtgtttcgaaccaggcagtcggaatgaaagatgtacaagyatgcacatcaggtaaaaatttttgcaatacaaatttaactctggaaagaagcacattaaaaatagtttaaatgctagcagtcttcgtattcctgtctttttttttttcaaatttgagggatagatttgatatatataatgcagatattagcattggtatctatgtttgaaaaacattatatttagaagcataagatagattttaaaaatgtaagctctaacttagatgtatcttgtattacgtattgctacgctgaagttctcagttgggaatacctatactcattcgggtttcacagaagtgaattatgagactacaattttttcccgtgtttgaaatgcttgttggaattctgatctttacctagaggaaagctttccttgctaacatgtcaattttgtataaagtttaattacttcatcctagtgttagactgattatctgaagcaaattggatgttttgattagtgtgtgtgtgtgtgtgtgtgtgtgtgtgtgcagggaatatcttggagtacaaaaatgaggaaagtaatctttttttcatggctatttggcagacacactcatttcaaagagtgattctgaaactttataggcttagggttttttgtgcaattaataattattgcatagaagtaaccaacaccctgaattaggtgtttgtcattgtcatgcacttttcatacattttaccatatatgtgtatggccataaatcatatgtagaattggtgtttctgtcctaaaatttcaatcatataactgattgtacattataaatatattattcagcagctttcttttgcttactcagcgttatagttttgagatcagtcgatatgttttgttcacacccattgatttgtccaaagagatgcattgctattttcagaagtagttctagttgagtttacatttcctatagtatttcatgctatgacagtaccacatttaattcaactctsttttgtggtgagaaaaagataaaaacattaaaaaatgatggcatatcccaaagagcttttgtttaagtggattgtatctattgatatttactatatcagaaactgaagctgaataatttaaaatataagcatgcaccaccatgcattccaatagccattataactctggcccattaagcacccatgatcttatgacacatcacgtgtctcatggttaaacataagtcttgttattaaaagaaagttcatattactgaagaatattattaataaacaaagctctcatggaaaacaaaatatataatattgctgagtgaatcaaataagtaacactaaaaaataaaaatgtcaaagatgatcgttaataaaacctatgtgagtgaatggcaagtacaggacatgtagaatacaataagccatgcaggagtggtgtgtttctgggggagtggaggacatgggactgcttctgttttagaaggaatttctccacgttagtcaaattgtattatgatttacattctaataatgaaaactttactttcagctttttcagctttggattttaatagtttgaccttcagtaatgagcttcatgaaagatctgagaatttgaaagttggtgatctatgtccatttgtgtctccaccaatgaccaacactgtgttgggatccacagacttggggaagatgaacttaatagattaagaaaagatgaccactgcagctgcatttctattttggaatcacactctccgtgacctgtgtgagtcacagctaccagaaaacaaagacagcaaagaaggtaataaagaagcatagagaattcagtcccagtgtagctgtacttggcttcataataccatagttgtaacttttaaagaatcattttgtggcaaastgtgtattgtgttyacaccccccttatacaagctacaaccaaacagaggacctatcagcagggcatttatgttcttcctttaaccaaagcaacataaaaataagaaagagaatgagatggacgagtaattttgtttaggctagcatttaacataaacttgaatgtgagtccaaggattacatgcagaactttgggactgggggggagatgtttgattgcctgctcaaacacaatgtggtttctttgctttatttccatagctctgaatttgtatcagttgtaactatataaaatgttgcccctaaagcaccttccaaaccccaaaattaagttatttttaataacttctgtgactttatgtagtatagaattgtctttcccagtatgaatgggtatccttgagaatttgctagatggtgtcttttcagctgtgttcacacagtttatcaccttgttttcatgaataacaatttactaggaatactagtttgaaggaaggtggtgtcattaaaaataacatgaaaatacattttaattttactaggacacataatctgttgaataattgcatctaatatgtgttctactttatgtcccagttaaattcattgtctttaataaggtatacgatcagatctatatagtaataaatcataaaatatttttgcaccccaatagtttcatttccttttttacacggcaaaacccagtctcttgaaaaaatacaaaattagccgagcatggcagctgcctgtggtcccagatactcagaggctgaggtgggagaatctctagagtctgggaggcagagattgtagttagctgagatcgcaccactgtgctccagcctgggctactgagcaagaccttgtctcaaaaaaaatgacacaaaagaaaagatgatttgaaagattgtcccatacagtttaggacaaaagggatagacatgcatagaaagaatgtacatttcaggtggtaaatatacactaggaaaatcaatgcagtgctaaggcagccccaaggaaagagatgcctgtttttctgaggaaagatagcaagaatcaaggaatacttcacacagcaatgtgagtgatgaaaaagaaatggttagaatagtagaggaaaacatttctgatatcgagaacaggatgtacactggtaaagtataaacagttacagtaattctggaaatcattgattataggcataatgtgttgttaagaatggcactactggaccgagcrcggtggctcacgcctgtaatcccagcattttgggatgctgaggcaggcagatcacctgaggtcaggagttcaagatcagcctggttaacatggtgaaaccccatctctactaaaaatacaaaatttagcggcttgagccacctcacccggctgaaaatttttttaagacaggctttcactgtgtcacccacactggagtttgagtgaatgcagtcttaatggccacaatcaatattcttttttaggtcacagtcaaaattctttattgataaagacctctcatgtttatctcaaaagaagctttaaggattgtctaggaatcaccacatgctatttaggttctatgtctcaaaaaaagaaaatgctaaaataatgtagaacatttaaattcactattactaattacacagttttctgtgattggaaatggtcatcaaaccaaagggaaaattgcaattttcatacgttatcttgagtaatttcacttagagatttcattgaagttaattcttcgtcactattgttggtaaattaagagtttttaggaagcagtttctgtaatgaaatttcagatgttttgaatatttctgttttatagttaactgtgcaatacttttattgaggttttcaaatacaattactgtgcagttaaagaaagcaatgttatgtccagctttcagtaattgcttgtatgggctatctgtagtccctggatgaaataatgcttgagtagatgaataaaaatacatgaatgaattataatatttagacaatgaagattgcctataaccttatttttagcataattccctaaagctatttgtgttatatgtttgaatgcatttcaatatgaacttggtaactgtcatttctattttaagacttcagtgacctgggaggagaaaataattgggcccggtggttattattactagattttcctttgcttgaatctaggcttgtgtctttcatctattggaataaaagcattaaaaataatctgtggtatattttatataatctgattcattggtaatctaatcttgcaatataaactgggtgcattaagcacttgtagtatattaagcctgggagactgaagtttcttttcagcgttcctattaagtatatggtgatggaaatttttcaaaatttttaatggaaaatgatgtcccaattcactcttttctttttgattttagatgggaaatgtaaagtcataagatcaataggttgactgtgacaactatatttacttacagagagaacaggaaatgagaatgggtgatgtgggtccccatgaagcaataaacataggaggtagggatttgaagcaaaaggcttttgtaatttatcatttttggggggactgtttatgctgtttgtggtatctatatatcagtaagaaactaaaatacgggaccaacatttctaaaggtgaaatctcttacatccattaaactggaatgcaatacaattatattaaaaaatatgcctgggaagaaaattctcattttgtttttgtttgaaggctaaaagatgtgttatacattcataagcttaatgaaagaaacatataaaccaggttgtaatacagcctgaaaggagtgtagtcattgcatggtgtaatacagctctgtttttgcagttttaaaatcaaatttatgccttctaattggctttttttttttttttttttggcaggacctcactctgttgtgcatgctggagtacagtggcgcagtctctgctccctgaaacctcgacttccagggctcaagagatccttccatcttaccaagtrgctgggactacaggcacgcgccaccatacctggcttattttttgtatttttagtagagacaggatttcaccatgttgcccaggctggtcttgagctcctgggctcaagcagtttgctggcgttagcttcccaaagtgctgatattacaggtgtgagccaccttgcctgtcctaattgaacattggaaattgatagtttccgagttggaaattgatagtttctgagttgtgtttttaggcttttagagagcattttatacttttctgtcttaaactagctttttgtgtaactttgaagctgttttccttcactttaatgaatattgaacttttttcctttaacctacagtrttgtgcacagaagtgcactcagtstttgtagwctatractcrtcaagggaattacatgtgtgttgccaatgcatgttttagagttgactaagcttttaagaaagtatattagcaacttcagtttggatttgctcatatagccaagttgcaagggaaataatgccaagtaagtaacctgaaggaaaaacaagtgtggcatatcgtaggccttactaaatttgaaatttgaaatgtcatacatttgaaagttggatacggaattaaattttattaaattaattgtcccacaaamgctgtcccacattaaattgtcctacaaaaggtgttatgaagctaaaaatctttatataacttaaatgtacatattgttttaaagattacactaccatggcaaacaatattcttaacatgcacacccatttacaaaatcaagtatgttcttagcatgtatagtctatcaaatgaaacttaaaagaagtcatgtgtggaatgaacattttccatgatcagctttttttcttaaacttctgttgccagtttttcagtactactaatcagatgatgtagagtcatatattgctgtttacttgatcactttttaccaacaagtagttagtgaatacttctggtatatgcaggaagcaagaaacatggcccttgcccataaagaacttaattgtgaaattactacagtggatacgtgaaataattaatgaaccaagagtgtctacattccaaactatgaagcataattgagtataatgatgtccaagtggtccaatatttatgtcttttttagagtaaattttgggatggtatttaatataatccatgtaattttaaggattttaggaataaggttattgtagattataggcagtttaaaaggccattatcattattagagtgacattaacatcaaaactaaactttaaaatagtataaaacttaaaaccgtttctgatggtatagagatactctgcaattttatgagaagaaatataagaatatgcctttagagtccttatttagttaggaattgaggagaattaaaaattttttgtgacattttattcaccagaggacctatttacattttagcacttactctcctaaagtccagtttatctaattttctcttcagtcttcaktcaatgtgagacttcatcataatggttttgtagagctattaatcattatcatgcagttgggttgttgggaagttaaaactgtcataactaatcaagttacattgatggaaagtggcagcagattttctggtgtatcactagtgtgtataaccaagtgaaacctacattataatgctacctttctagtaaccagataatgctaacatttcttagatccttaaatttatttatagctatgtggtgaaagatatgagtactaaaagtaaggctctaagttaactgctgttagttggaaatattatttttgatttttttatacccacagatgtatagttattttccaaacccaccattgtaaaattacattctattaaagagaaaaagaagaaaaagaaacttaatttgttttttgggggatagttgaggtaagacccttcttagatattgttcttgtactctcttcatttctagattgtagaaattattaaaatagctatttagggctatactgagggagtgaaaatattcttggataaagtatatttattggcaagagcatttggggtgaaggaaacaattccttcccacgaagttgctaggttcctggggattggatttgaagagcagaagtatgatgcaggggctggtagggactcagccatgtagagagtataatgtataatttcagctgcattataatgtatctttgagaaattgagttcttattgtcagaaaattgatctatgtaatgaaatactagaagaaaaccctaaattagaatggctttgttacgaatttttaatgataaacaagtgctaccacttaaaagggaaaaaaattttcaaagaaaatacctaaaaatgtgttgtatttgagatcatcatatatgtagtattagagcacagacactattaaaattaatacgaggtaggtggatttttttaatgaaaaacttgaaatatatcagattgtccccatttatggaatttaagcttgtcagaaagatccagatagctatatattttatctgcatttggttgcgrttgcttttaaaaataagttttgttataagtcatttcaatttttttgtttacattccatatttcaatataaaaagttaaaagagagtacctcctgtaatttagcaaggtattccataaactcaaggaggaaaaaaaaactaacatgagaggctagttataatcatctttatgtatatattgcaggaaattatttcctctctggcaacttagcataatttacatgctaatatttttagccacagcttaaaaaaattaagtggttttgtaagtgctaatcctttgttactcatttaaactggtaaaatgtagtccccattgttaggtattatttggtttaaaagccaactataacaaataatagtgatgtctcagcttgcaaactgttacagtcttaaatgccctaaaataattgatagtttcctcattgattttatgtacatttggcttggggatgaaaattctaattcgagtgtaggtaatgccctattacagattagataatgcatatcacattctcaaggaacaaaaataattttaataacggtcttggtatatagattgcataaatattgttaaattttaaatgtttactaaactaagataggacagctctaagtatagattgttttacatagatgygtttarcmcagcmcctgctggtaaccaaggtcctcctccaatgacgggtatgaatatgaacaacagagcaactatacctggcccaccagtgggtcctggtcctgccatgggaccagaaggagccgcaaatatgggaactccaatgatgccagataatggagcagtggtaatgtatcataaacattattttgattatattcagtaatgtacacttctgcatcaaggataacttcacacttaatataatttggtatcatttgttttggcagccaatgaagaagaaaattttgtgacatcatatgttgatttactagagatagtttttaagtagtccaagaattaggattactgtcygtggcatgctgtggtacctcagtatttagcaaatacatatgctaattacattatttttctgtgcttttaatttgtatccatcgtttaccagcattctaatgttcaagaattttatgatggtgttcttttcctgtgtggactccttatgtttgatggggacaaaagtccaatatgtatgaacacagagttttcagtaaattttttttttttttttgagagagtctcgctctgtcacccaggctggagtgcagtggcacgatctcagctcactgcaacctccgcctcccgggttcaagcaattctctgcctcagcctcctgagtagctgggattacaggcgcccactaccacgcccggctaacttttttgtatttttagtagagacggggtttcatcatttggccagactggtcttgaactcctgacctcatgatccaccttcctcagcctcccaaagtgtcagtaaatgtttttattttttattattattatttttatttatttattttttttgagacggagtctctctctgttgcccaggctggagtgcagtggcgcactctcggctcactgcaagctccgcttcccgggttcacgctattctcctgccccagcctcctgggtagctggtactacagctatctagtcccagsacataattgctatggaatcataaagatgtcagttctcccaaaattaatccataaacttgatgcaattccaataaaaattcaagaggattttttacaatactgaacaagctaatcttacaattcatgaggaagagcatatgtttaaaaacaaagcatcgaagtggtaaacttattctaccagatttaaataattattaaaaagttaagttaaacagtgtggtattggtgcagagatagatgtataagctaatgaaatgaaagagagcctagaaagtgcacaaataatatatggaaatataaatgacagacatggcatcagaactcagtggtaaaagatgagagtattcaataaagggtgatgaaatttttggctattaatattatgatataataaaaaataaatatttggtccttgtccttagttcctgacacacagttcctgaagtccttggaatctccagagtgatgactgaattaatcaccaatggtgaatggcagtgattatcagtgagaaccaaacctaagtctgcaggcttagggcaggggcccagacaattagaggggctcttctctttgagacttgtcatctagaactcattgtcactggaggccaaagcataaatgagcctatcggttgccttgggttacaagaacaagttttaattaattaattaattaattattttgagacagactcttgctgtgtcgcccaggggctggagtacagtggcacgatctcggctcactgcaacctctgcctccctggttcaagcaattctcctgcctcagcttcccgagtagctgggactatacgcacatgccaccacaccaggctaattttttttatttttagtagagacggggtttcgccatgttggccaggctggtcttgaattcctgacctcaggtgctccacccacctcggcctcccaaagtgctgtggttacaggtgtgagcctccatgcctggccaagtctgagtttttgttgagaaagccaagtagcagttcagggacttgtggccaccaattgtctctgagattcaaagtctgttctttctattggggactgagatggacagataatcatgcagacttaaggaggagccatagcaatgatttggcatgggaggaagtctgagctagcaagaactggaggaataatttccctctgtaggaattcctgctctacctacttgctataggagtaaagtggtcatgatttaaacagtcttgtctgtacctgttatgttataaggatgtgttcatggccctatctgctaagagtgagttgttcttataaataaaataaaaattagtaaatttatacacaatttgttatgcaaatcctaagagtgatattccaaaaagccaaattttagaagtaaataagtacataaattggccttttttgttgagacggagttttgctcttgttgcccaggctggaatgcagtgacacaatctcgccacactgcaacctccacctcctgggttcaagcgattctcttgcctcagcctcctcagtagctgggattacaggtgtccaccaccacgcccagctaattttttgtattttcttttttttagtagagaaggggtttcaccaagtaggctaggctaatttcaaactcctgacctcaggtaatccacccgccttggcctcccaaagtgctgggattacaggcatgagccaccgcacctggccaaggaagacactttagatggtgccagagttgaggatttggcctgcgacttattgcagttgccgcactgcagtttccacactgtggccttagaagagtcttatccagacctgaaatcccagtgccttggaaacatcaggactggtcagaaggacagtaagtcctcaaggcaccagcccctacttctccacacagattgagaggtaagtattctaagctctctgcagggcccatatcctggatgtggacacccagtcctgctaggacctgcttccagaagagttgatcccagccatgaaactgccctgatatctttatcctgtatcagccttgtgagtagtcagtaactgggaccacaggcgcgtgccaacaagcctgcttaattttttttgtagagacgggtttcgtcatgttgcccaggctggtctggaactcctgagctcaagtgatgcacctgcctcggtttcccaaagtgctgggattacaggcgtgagccaccacgtgcagcccaatttgtgatcttttatgcattgtttctttcatgtagcatgttttcaaggtttatccaacttgcagtgtattaatgctgaataatatttcattgtgtagacatactgtatttttatttttaaaattttgtttatttttcattggtacacaataaatatttgtacatatttatggggaacagatatgttgttacatgcatagaatgtgtgatgatcaatcagggtgttaaaggtatctgtcactttgagtatttgccatttctatatgttaggaacatttcaagtcctctcttatagctattttgaaacacacaatacattgttgctaactgtagtcaccctactctgctatagaacattcaaacttattccttctgtctaactgtattaaccaaccaccacttttccctgccaaccctcacatgcttcccagcctctggtatcttatctatccaccatcaactttcttagctcctacatatgtgataacatgcaatatttgtctctctgtgcctggcttacttcacataacaatgacttccagttccatccatgttgctgcacacgacatgattttattcttttttatggctgaatagtacttgaaaaaaaaaaaaatatatatatatatatatatcacattttctttccttctttctttctttctttctctttgtctgtctgtctttctttctttctttcctttttttcttttttgagacagagtcttgccctgttggccaggctggagtgcagtggtgcaatcttggctcactgcaacctccacctcccgggtgcaagcaattctctgcctcagcctcctgagtaatcccgagtagctgggattacaggcatccgccaccatgcctggctaatttttgtatttttagtagagacagggtttcaccatcttgggcaggctgctcttgaactcctgacctcgtgatccacctgccttggcctcccaaagtgctgggattacaggcctgagccaccgtgcccagcccacattttctttattcatttgtttgttgatggacacttaggttgattctatatttttgctattgtgaatggtgctgcagtaaacatggaagtacaggtatcatctctttgatgtactggttttgtttcgtttgtataaacacccagtagtggcattgctggattgtgtggtagttctattttcagtttcctgagaaatctccatactgttttccacagtgattatactaatttacattcttactcagcagtgtaaaagagttcccctttctccacatcctcacccacatccattattattttgtctttttaatcatagccattctcactgggtgaaaatgatagctcattgtggttttaatttgcatttcctttatgattagtgagattgagcattttttatatacctgtatgtcttctttggagaaatatctgtttatgtcctttgcccaatatttatgtatgatgtgtgtatgtatgtatgtatgttttggagtcagggttttgctcttttgctcaggctggagtgcagtggcatggtctcggctcactgcaacctccacctcctgggttcaagtgattttcctgcctcagcctcccgagtagctgggattataggtacctgccaccacgcccagctaattgtttgtatttttagtagaaatggggtttcaccatattagccagactggtctcgagctcctraccttgtgatctgcccgycacggcctcccgaagtgctggaattacaggcgtgagccactgtgcccagcctctttttactgtttttgacttaaagtctgttttatctgatataagtatagctactcctgatcacttttggtttccctttgcacagaatatctttttccactcctttcctttcagtctatatgtctccacaggtgaggtgagtttcttgtaggcagcatatatttgggtcatttttatttttaaaatccattcagcctgtctatatcttttcagtggaaagtttaatccatttacattgaagactatttttgatatgtgagggttattcctgtcattttattaattgatttctgttgctttatttgtcctttgtctctttctttctctcttattgtttatcactgtggattggtggttttctttagtgaaaacctttgaattgtttttcttatttgtgtgcttgctctaccagtgggttttatactttcctgtgtttccatgatggtagataccatccttttgcttctgggtataagactcccttacatatttcttatatagctggtctagtggtgatgaattccctcagcttttgcttgtctgggcaagacattatttcaccttcatttatgaaagataacttttctggatgtagtttccttggctgatggtttttttctttctgaacttagaatatatcatgccattctttcttggcctgtaaggcttatgctgagaaatcaactgttagtctgataggagttcccttattttctcctgctgtttttagaatttttctctgtcttcaatttttgacaatttgatgataatgggccatggagaagatctttttgaattatatctgtttggggatctgtgcgcttcctgtatctgcatgtctaaatctcttgctacacttggaaagttttgttactttgttaaatagcttttctatccccttggtttgttctttgccttctgagacactgaaaattcaaatgtttggttgctttgtggtgtcccatgtgtcatgtaggctttgttcattgcttttttctttttttttaatttttgtatgatggggttattttaaaagatctgtcttcaagttctgaaatttgttatactgcttgacctagtctgttgttgaatttttttttttttttttttttttgagacagagtctgtctctgttgcccaggctggagtgcagtggtgccatcttggctcactgcaacctctgcctcctgggttcaagcaattcttatccctcagcgtcctgattggctgggattataggcacacactaccatacccagctaatttttgtgtttttgtagagatggggttttgccatgttggccaggctagtttcgaactcctgatctcagacaatctgcctgcctaagcctcccaaagtgctgagattacaggcatgagacaccatgcctggcctttttttaatgtttattccacattgtgtcagtcctcacatgtctcctgggatccatctgatatgtaatctgttggtttcccagcagtaataatttcatgtaaaatcccaaatctgacctgaaatattttctcttctcattatctttacataaatattaaccattttgacatactgagatataattcagttggttcatgactatgctagtagctccatttttatatataaatagacatgcctaaatcccgtttatttttttgtatacacatttatttaatttttaacttttattttaggttcaagggtacatgtgcaggtttgttatatatgtaaattttgtgtcatgggggtttgatgcacagattgttttgtcactcaggtgataagcatagtacctgataggtagctttttgatactcaccatcctccagcctccaaccctcaagtaggacccaatgtctgttgttcccatatttgtgttcatgtgtactcaatgtttaactcccacttataagtgagaacatgtggtatttggtttcctgttcctgtgttagtttgcttagaataatttttaagctggatctggatggcctccagctccattcatattactgcaaagtgcatgatcttgtttttattttagggctgcatagtattcyatggtatatgtgtgccacatttttttwattcagttcaccattgatgggcacctaggtcaattctgtgtgtttgctattgtgaatagtgctgcgatgaacatatgcatgcatgtgtcttcatggtagaatgatatttatattcctgtgggtatatactcagtaataggattgctgggtcacagggtaattctcaagttctttgagaaatcaccaaactgctttccataatggctgaactaatttacatatccaccagtagtgtataagcattccctttcctctgcaactttgccagcatctattttttggctttttaataatagccattctgactggtatgagatggtatcacattgtagttttgatttgcatttctctaggatcagtgatgttgagcgctttttcatgtttgttagctgtgtgtatgtcttcttttgagaagtgtctgttcatgtcctttgccctttttttttaatgacgttttttgcttgtaaatttctttaagttccttatagattctggatattagacctttgtcagactccacctcctgggttcaagcaattctcctgcctcagcctcctgagtagctaggattacaggcacctgccaccacacctggctaatttttgtatttttagtagcaaygggttttcaccatattggccagactggtctcaaactcctgacctcgtgatccacccacccgcctcagcttcccaaaatgctgggagttctttaggtttctattaggtccaattggtcaagtgttgaatttaagtccagaatttctgtgttagttttccgtctttatgatctgtgtgatgttatcagtggggtgttgaagtcccctgactattgttgtgtggctaagtcttttcataggtctagaggtatctgttttattaacctgggtgagccaatgttgggtgcatatatatttaggatagttaaggcttcttgttgaattgaactccgtatcattatgtaatgctcttctttgtctttttttactattgttggtttaaagcctgttttatctgttttaggaatagtgacccctgctcttttttgtgttttgtttgtgcgatagatctttcttcaaccctttactttgaacctattggtgttgttacatgtgagatgggtctcttgaagacagcagacagatgggttttgtttttttaatccaatttccactctgtgacctttctttctttctttctttctttctttcttttttttttcagaatctctctctgtcatcaggctagagtgcagtggcatgatattggctcacagcaacctctgactcctgagttcaagtgcttctcctgcctcagcctcctgagtagctgggattataggcatgtgccatcatgcttggctaatttttatatttttagtagagacagggtttctctacattggccaggatggtctcgatctcctgacctcgtgatctacccaccttggcctcccaaaatgctgggattacaggaatagccaccgcacccagcccactctgtgacttttaagtggtgtgtttacattcaaggttactattgacatgtgagcttttcaccctatcatgaaattgttagctggtttttttgtaatttctattgtgtggttgttttatagggtctgtgagctatgtacttaagtgtgtttttatgatagcaggtatcattctttcatttccatgtttagaactcccttaggcatcttttgtaagactggtctagtggtaatgaactctcttggcatttgcttctctagaaaaatgtttttatttctccttcactcatgaagcttagttcggcaggatatgaatcttttgattataatttattttcttcaagaattctgaaaatagatacctcaatctctgctggcttgtaaggtttctgctgagaagtctgctgttatcctgatggggctacctttgtatgtgatctggcctttttctccagtgcctttagggctttttctttgacagtgaccttggacagtctggtgagtatatgccttggtaatgttcattttttatagtatctcacaggtgctgtctggctttactgtacttagatgtctatctagcaagattcaagaaattttcttgaattattccatcaaatatgttttccaggctgttttctttttctctttctctctagggcatgccagtaattcgtaggtttgatcactttacataatctcatatttctgactttcttcactttwaaaaaatcttttttctttatytttgtctgactggattagttcaaaagaccagtcttcaagctctgaaattatgttttctactttgtccagtctattgataaagctttcagttgtattttgaaattccttaagtgagtttttttaattctagaagttctgattgatttcttattaagatgtttatctcttccttcatttcccggattgatgtagaagtttctttttgttgatttcaaccttgaatctcattgagcttccttgcaacccaagttttgaaatgtttattgttatctctgagttttcattttggtacgaagcattgccagagagctagtgtgatcctttggtagtgtcactacattcagatttctcatggtgctagaattcttgtgtgggtccttctcatctggagatgctagcacttctaatttgtgtaattatttttgtttgggtaggattttttctttttctttccttttctataatattattgttatttttttcttctttccctttccctcctccctaggggtgtggctgtagagcatgctgggtagggtcttttggctttgcttctgtagccctaatgcacttctgccagcaggttttatattgggtgtgtggtttgacctacaagccagtagatggcgccatgggtaagagctggctgttgccagtgctgctggctgtgtacttgatccttgtttattgggaggagctytctsctgccccaggcaaagggctgatttcctgagtacacattaatctgagctccctcagccctaggggtagggggattgggggcacaagatgggtggagccagatagggaagattcccccagtgttgtcctgctcccagtccaggtttgggacaatgccrgcagcgtttccctgtgtctttcccccacaaagtctccaagtctctcctcaaatgagctccaaggcttgggagaaacaatctcttcctctgcccgggttgcgtggatctccagtggaaaggtgagacagagggatgctgtctgcctctctcacttactgaggcttcactcacttctatcagtcgaatgctgtcctgagggctgcttgcctgcaatgtcctccgcaagatctgggatgtccttcawaattccggggaattgccatttyctttcttgaattaaagctcacagagttggtctttatgtacttgcttgctatttccaaatgactgaggcatgctaaaagcctgtaatctgccatcttggaaaaaacatccttgcatccttaagagaaatggcacttggtgttgatacatggtgtttctacattrctgaattcactttgaaaatatatgtatattttwaaatctacatttatatgtgagactggtgtaaaaatatcttttattctactgtatttgtgcaattttggaatcagttatattaatatactaaatgagttggcaatttttcttttttactattatccaaaaaaattataaaagacataattgttgctttcttatagatttagtaaaaacctcatcgtgtccttttgtggagcgatggtgagagatatttttactgtaaatgtaacttgygtatttttcacctgtgaggcagaggttgcaatgagccaagattgtgccactgcactccagcctgcgtgacacagcaagaccctgtctcaaaaaaaagaaagaaaatcaacttaaaatgcactccttgaatatttctgagtgtatttttataccacgtatgttccttgaactarcttcttttcttttctaggaagaaccggaactatgatttgtgccttccttattgcctccgaaatatttttaactgcagaggtatgaaagatgttctacaaactttgtcttatgatgattgagtttgctagttctgaaacatcactggtaggacgttaaggtgttatttgagtcatggtgcttagtaaaattgtaattagagaagcagtttttagaaagtctgtttttgatactttcttgtttaacgtgcactagttagtagctgacctcagaatctctttgggcaaggactagagtgaggtcaatgaggtgcaacatttaagggaatgctaaaaattgtaataattaaaataaataattttaacacaatattttaataaaaattaatgyaaaaaaatctatgatgtatacaatatcaacattttaaataaagacaagacctgatggggcaggattaaggtgcggggtgtaaagccatgttacacagaaaaaaacattcagtaatcaagatgcttccctcacttcacctggctctgctcttactcctgccagtaccatgtcttcttccttcctcgtgagaatagtatcaagcttaattagataaattctccaaagagccttgcccatcctcacaactcttaggtagataaaaagcaacatttcacaactcaaaacaaagcctctcctgaatgtaagtatctttgcttagtcaatacatgtggagtctgtgacctctagaaatttctgataagacaaggtgggctgtttccacttaaagcagagttctcagtcatttttctttctgccattttcttgctgagatgctaccatttccagcagctctgctcgagttgtttggcctgcagtctagggaagaggtggtggttgtgcacaatgcccagcactcccattccaccacctttgctttctctgatttgagatacacagattttgaaaatgggtgttctaggatggtgtttttcaagctatggatcatgatttatcagtgagttgtaaaataaagttactgggttgtaactgacatcttttaaaaataaaatggaatagagcagaatagaaaatatcaaaaggtttaaatattggggtgtgtgtgtgtgtgtgtctcctaggtttattaatgtggattgcagcttaaaaaacaaaaggtttgaaagtcattgacagccattgatccagagccctagactgagatccagggacctgtatctgctgtgctgctgcttctaactggctgcagcatctccttggcaggttgcttggttttcttttggtctcagtgttgtcatttgtaatatggaaagaagggttggaccagatgctttctaaggtctttccagctctaaaattttatgaatgtatgaatccttgaatgagagaagtcctaattttgttattttcactaaccctctgcccaaagatcactcggccgggcacaggtggctcacacctgtaatcccagcactttgggaggctgaggcaggtggatctcttgaggtcaggagtttgagagcagcctggccaacatggtgaaacccctatctctactaaaaatccaaaaaattagctgggcatggtggtacacacctgtagtcccagctactcagaaggctgagacagtagaatcacttgaacccaggaggcagaggttgcagtgagcttagatcctgctactgtactccagtctgggttacagagcaagactctaccaaaaaacaaacaaacaaacaaacaaaatcactgactttaggaaagaaggtgggtgtagaaaccctaagggtacctaatataggaaaggaaagagtgcagatgaaccatggttggattgtacccttttttgcaggaaagcctgtattattttggagaaaggcgaacagataaaacgcacagcagtaaatttcagggactagaaactccttctcaggtaagttttctttttaaaaatgggaggtttttttaggggagtgggttaagattgccagctgttatttggtttcattttagactcttctcctttggtgatcaggcagcagcagttgggtgccctgcaacaggccttggtccctccctgagtctgagggtcacgctttaggtgctgcccacatgctggggactctggcttctcctcagagaatcctgctttctattctatactggttattgtttatggagctcaggagttgattattttcccaaagtaggaaggtccagtacccaaggctccaggactctgaagtgtgtctaaaatcaccagcctttgatttcaatgtaaaaaagatccaagtctttcacaaacccttacttgggcaattcaacccttgcaaaacatcacaaagaactgtttttggatgactcmtggttgtgtgtgtgtgtgtgtgtgtgtgtgtgtgtgtgtgtgtgtmttttctgtgtgttgtgggggaggtgtattttaaaagagaaaataaaaggrraaataaacttttcaaaaccccttctgtatmccagacagtattgcacttttacgtatctcatttaatacccataacacctatatgaaatatacactgttactctgttttttcttttagaaacattttgttatggaaaattttaatcatatacaaaagtccagagcatcatacaatatatccacatatagtcgtcacattgctgcaacagtcatttcagccggcagccagccacatttcatccgttctttcccactccactcacacccctcaaccccactctccactcttgctttccctaaatctgagttattttaaaggaaatttcagtcrtcagatcattttatcccatagcattttagtatgacatttaagtactcttaaaacaacaacaaaaaaccttaacactttttatcatatctaaaaatattataccttaaaaatccttcatatcaaatttgtastccatgtttgtttccaraattgtcttaaaatctttgaaaatttagtttgtttaatcagaattcaaacaaagtccacacatttcatttggttgctgtgtctcctaagtctcttttaagaatctaagttcatagatttctcaccattttttattacttgtaatttgtttattgcagaaaccaggatgtttatcctatagcatttacaacattctagactttgctgaactattctaatattcactatctcatttaatattctcaataactctatgagtaggcactactgtcattctcatcttataaattagaaaattgaggttcagagaaagtaacttttgaaccaaggactgaaatctagatgtcagtctctgaagccctttttgtgcacagcttctcatttatattgccttttctatattgcccctgaaactgaagtgagagtgggttgggaattccgaaatggatttggatgtggctgtaaatgagtttttctttaagtggtgggagctgagtaagtactcttggccccgttagaagaacactctaactaccagccctaaacctttagtttgggccagaagaactcagccttatccactgatacttttctcccacacccaagcccaaaacaaaacaaaacaaaacaaagatattcatagaccctaagctaaaagtgataggtgaatttactgaagtgcagccctaatcatgccatttccatgctyaaaatccatactatgtccccactgccaatggcaataaactaaacgtttcaacctggcactcaagagccacagtttgacttttccaaccttctcttccactatgtgcatgcacacatcccatactccaacacatttagactgtgtgctctttcccagcctatggacacttgataccctcatgccgttgctcatgcccccttttcctagagtccctttcccttctcagcctgaagtagtctcttgctttttcaattcttagagccctttgtgtttcttttagggactacgtcactttgcatcattctctagttatttgaagtggtgacttctgtatcccctttaaaggcaaagcccatggcttacccatctttccacccttttctcgtaatatcttgttgtttgtagtgagtgcctcctatgtgttggttgtattaatttctactacaagtccatgttgttttaagttgtaggagaaggaagcgtgggagcacaagcagcttgagggccctggtgttttacagcccttagggaaaggtggagaatctagtggcagaagctaaggggatgctaggtggagctccttcaacaactctccccacacatctcctcatccccatttcttctgcagtcatgcatagtttccctaactttagtccagaactagcacatcaaagctgcaactgaatctcttctgattcactgaaaaagcaacaaagggattcagctgcacgtttgagagctgttggcaagacctcaggacagagtgccctctgtgtctggtggtgattctcagacaccatcacattctgatcctgcattgttagccattctactgactacatctactcctaagttaaggactttcttgagcctatctcatgactggccctttctgaagggaagtatggcagctagttactttaatgagcatttcccaatgggtaaggaacagtctgtgaacctatgagttttgttttgttttgttttgtttttaatttttgagacagagtctcgctctgtcgcccagactagagtgcagtggtgcaatctcagctcactgcaacctcgacgtcttgggttcaagcgattctcctgcctcagcctcccaagtggctgggattataggtgcccatcaccacgcatggcctatttttgtatttttagtagagacaaggtttcaccctgttggcgaggctggtctcaaactcctgacgcccagtgatctgcccacctcggcctcccaaagtgctgggattacaggcgggagccaccatgatggccaacttttgaattctgaaccagttgattgagtaccagagctcttcaataccttgaagaaagattcaggggagagccgttgtgaacagcttgccccagggaaaggacaaggctgagagaattccagggcttccttgagaaaacagaattgaggaaatgcaaagtgaagaattctagcatcaggaacaagagaagaatgatggaaaacctgctactgaggtatggaggtattcctctggagttttcacttataccattctctcatgcccaggaagctgctcttcaccaaaccacaagccttcctctaactcagtcacaactaagcttctatctggacactgatgatgctgtaactgttttgttgtgcttctgattagttgccctcnnnnnnnnnnnnnnnnnnnntcaaccataagcagcctataaacagggcctggctccatccttgttacttccccattgcactgaattcagtatttttccctcaaggtagatagttgtggggcagcatccctaaaaatgtccagttatataatggcatccagtaaatgttttcttaattacttacctccattaacaagctttatgcaaaaaaaaaaaaaaaaaaaggaatgctgactttagacttcatctccacttaaaggaagatttctgttgcttttcacaatagatatgttggatattttgcacaagtgaaacatctctacaactggaatctccctccaagacggatactctttataataagattcattatttattcgattcgtggtaagtgctttatgtgtaattgaagaattgggcaggagggccaatgtycccactctgggagagttttgctcatagtyatatatacagatgagcctaactcatacctgtctttttacatattgtcacacaggaactcctccttatttatgcccctcctcctgcaattgcccattgattgccagccctgagatgttcttcactttttcttttccatcaccaacttgggggacttcatccccttcccatctctcctgttctcattgctcctccggtctcaacccaggtggacttttccgggcagagggagcctctgatgagggaggaggaggacccatgtgccctcaagcctgcttatttctcagaaccacctctagttcagagtttgccttggtggaggtgtctccgtatcgtatcattttctcaccttcttttagaggcatttttttttctcatcaccctgggctctccctttcccctctctcctccatctgtaaccctctcactcccagcttacactcaggggaggcgggaaagcaggatgtgtctgtgtggaaggaatggggactcaccactcccactgccagagaggtagcagggaggtgatgcttcggaacccctaaagcaaacctcttctagcagccagcttgtggacctgagatggtgccagtgctgggtgctataggtgccatggggccaggatgctggtgtccacacagacagcgtagtatttttagccttctgagtttagttctacatttcactgatttctggtagacatcaatagaargaagttctgcacctggaatgggaaagagggaactgaggcaakaaactgtgatttctaatgacaaatgaatatcatggtgttagtgaaaacaaaattaaatgaaaagaaaacaaacagcatatgagatgagcaatcaaagataatacacttgtttattaaaatatttgttttaattttctacctttagttttgtacatatttgaattaaaattaacgtagagttgagagaaaagcaataaaaaaattaattggctgagaaaccaagtctttgaggaaatgctgagggaagtgggtcatttgaattgaaaaaaaaggaacaaaagagcctttgtctataaatatatactgaacaccacgggaatttttggatataaaaatcctatatttttatagagattgcctcaggaactggccttaaagtagggccaaagtagttaaactccagtatttattattaagaatcattatgattagaagtctgaggaaagcaacatattagcaagaaaggttgcaagtcaccttcccagaattgtctttttcttttcttttcttttcttttcttttttttttttttggagacagagtcttgttctgtcatccaggctggaatgcagtagtgtgatctcggctcactgcaacttccacctcccgggttcaagcaattctcctgtctcagcctcctgagtagctaggattacaagcatgtgccaccacgtctggctgatttttgtatttttagtagagatgtggtttcaccgtcttggccaggctggtttagaattcctgacctcaagtaatcctccacccacctcagcctcccaaagtgctaggcatgagccaccatgcccggcctaccttccctaaatattttttctggaaagataaagtgatgggattctaagtctttgaagctgaactatgtatatgttttttctcttctctagtcttataaaatctgctttaggagacagaactaggcttgaagacttgtctttcaaagacaaaatccatgcaagaccaaataagtaactattgataacattgttagcttggataattttttctctttttaatccatgatgttaattggtgagacatattgatgttcacgctaaccaacctaacttttttatttcatttaggtgttggaacaggcgatgtatgtgatctaaaattccaaatagtaatggagaaaaaggttgtcttttccagyacttcattaggaaattgttcagtaagagaaaacatgtgaattgaaaaactctgatgtttgttttaaggctgaatgtcaaaccagcaatgttcacctccctaaactatcactcaccataaagagattccgtaacgctttctggttaccatccaacttggtgtcactgggtttggatgcaaaccagagataaattaacctgtttgttcaaaacagttttttcagggtgctttccagaatttatttctggtcagtgttgctttgcctttcacacttccacaaatgctgagcatgttcccaggaatgtattaaggattttaatttacatatctggtcatttttaaccatattctcttcttctcagtcatttgatcttttattatatagcactgattctaaaacttcagtgtgcatgaaaaccactgaggagcttgtaaagatttacattcctaggttgtacccccaaagtatgattcgggaaatctggaatggggcccaggaatctatagacttagcaatgtcccaagtgattctaagtcagacgttctgtgggatgaccctgtgagaaacaatgcaaggatgaatgaactggggaggaacctctttatccaaagcaaaagggacctggtagtcaatgttttgctacaatgaagaaatgcctaaaactatataccttttctgaaacagtaagaaagcatccttcatggtctaataaycataaacttttagaattcctacccaggcctttgtctcaaattctcctattactaaccctattccctgccaccccctcctcactccgcccccggcttttttggcctctcccgactgagggcattcacccaggcctgacccttggttttctgttcttagcaaatgctttattcttaaagggtgacccattccccttacttcaactattatttgttcatttactgaacagctgatgcaggagctacaacatgaacagtttccactccaactcaaatgcattagccagtctgaattatcaaggagctttctctctgcctctgcaaatggcaccagcattcttccactcacgccttgggctttgattctctttgcctcagccccctaaatccagctagtcatccatctctgttgattatgsctttgacagttttctatgttctccttcctttctgttctcactgccactaattgtccagaatctcctttgctcagcgtagatttctgcagtggtctccttaccctttctttctccttctataatgcaatgtatagaatcctgaaatatgcatcctgaaatattcctctcattgtgaaaaattgtaggtagagcagaagacacactgtgtgcccatggtcagagccagttaacacctttggctcaacatccttatctgtaaaataaataacacatccaagtgtaatgggaattcaattagataatatatataaagtttctttgtgaactataagtcactaaataagtgtcatatgtgataattatcaggcctctttgtcacataggaaatgccccaccatatttttcaacaacttctctcttttttccttggctgttgagctcttaagatataatagccctaacgtaatacctgagcttttttccatcagtagcttgaccagcagacttcattccaaataaactgggtcatccctttttgctcttggaacacaactctaatttagttatttggttataaataagttatttggttataaataagttaaagaaataacttatttctttctttccttcctttcttcttttacttttttttttttttttcttgagccagggtctttttctgtcacccaggctgtagcgcagtggcatgatcatggcctactgtagcctcaacctcgagctcaagcaatcccccaatgtttttttatgttttgaagaggctgggacttgctatgttgcccaggctggtctcagactcctgggctcaagcaacgcgtccacctcagcctcgcaatgtgctgggattataaacatgagccacactgcctgatattgtttgttgttgtttttccaattttttttcttttctttttgtttttgagacagagttttgctcttgttgcccaggctggagtgcattggcacaatctcggctcaccacaacctctgcctcctgggttcaagcgattctcctgcctcagcctcccaagtagctgggattacaggcatgcactaccacgcctggctaattttgtatttttagtagagatggggtttctccgtgttggtcaggcttgtggggaaaagaaagagacatcagactgttactgtgtctacgtagaaagaagtagacataagagattccattttgttctgtactaagaaaaattcttctgccttgagatgctgtgctggcagaaacgtgctgtgttgactcaaggtttaatggatttagggctatgcatgatgtgctttgttaaacaaatgcttgaaggcagcatgcttgttaaaartcatcaccactccctaatctcaagtacccagggacacaaaacactgtggaaggcggcaggaacctctgcctaggaaagccatgtattgcccaaggtttctccccaggtgatagtctgaaatatggcctcgtgggaagggaaagttctgaccgtccccagcccgacacccataaatggtctgtgctgaggaggattagtgaaagaggaagacctctttgcagttgagataagaggaaggcgtctgtctcctgcccctccctgggcaatggaatgtcttggtgtaaaacctgatcgtatattccatctactgagataggagaaaactgccttagggctggaggtgagacatgctggcagcaatactgctctttaatgcaccgagatgtttatgtatgtgcatatcaaagcacaacacctttttcttaaccttgtttatgatacagagacatttgttcacatgttttcctgctgaccctctctctccccactattaccctattgtcctgccacatccccctctctgagatggtagagataatgatcaatactgaggggactcagaaactggtgccagcgtgggtcctccctttgctgagcgctggtcccctgggcccacttttctttctctatactttgtctctgtgtctctttgttttctcagtctctcatcccaccaaaggagaaacacccacaggtgtggaggggcaggccaccccttcaaggctggtctcaaactcccgacctcaggtgatctgcccacctcagcctcacaaagtgctaggattacaggcatgagccaccatgcctggcccatttttctaatttctactttgcattattgctggtctttttccctccgtttggactagagtctattttcagagctcttcttcctttatctaaactgcttcatgcccaattcaatttctacctccttaatgaaatttttgcattctgtaccttctgttaactagcccccaatagtgcataacagcacrcccagtctttatcatacagattatgttatgtcccattctactattgtttcttatgtgtacagctcccaaaaggggccaactgagtctgcacctccttttgtgttttctacagggcctagcatagacctttcttattrtgggtgcctttatttatatgagagtgagtcaaagaaatagtatagcctcaaagtcattcataccataacttgagctatctttggttactccatccagcagcctgcattggtcaagttcaaagatcccattgacaaacacaagagttctgataaaacatgatgagcagggggaccccactctccctctcccttgggaggggcatgcgggcccaacccccaagtattgcagacccccgttcttattttttaaatttaggaaatataaaaccatgatgagttacacattgctttttgaatgtcaatgctagctttaaaattgagcttcttaatatattctcaaaaaaggccctaacacatgaaaatcaaakgacacacattaaatgataatatttaattgattaaagtctaatagaaaattcaatactttttaaaagtgtggcacttttgaaaagtgcctcatggccaggcacagtggctcatgcctgtaatcccagcactttgggaggccagggtgggtggatcacgaggtcaagagattgagaccatcctggccaacatggtgaaagcccgtctctactaaaaatacaagaattagttgggcgtggtggcacgtgcctgtagtcccagctacttgggaggttgaggctggagaatcaattgaacccgggaggtggaagttgtagcgagccgagatcatgccactgcactccagcctgctgacagaatgagactctgtctcaaaaaaaaaaaaaaagaaaagtggttcatgataaccctcaaacatgttggcctttaaaagacataaacaacaggccgggtgcagtggctcatgcctgtgatccagcactttgggaggcccaggcaggcagatcacttgaagccaggagtttgagaccagcctggctaatatagtgaaaccccatctctactaaaaattcaaaaattagctgggtatgatggcatgtgcctatagtcccagctactygggaggctgaggcacaacaatcacttgaacctgggagacagaggttgccgtgagccgagatcacgccactgcactccagcctgggtgacagtgagactctgtctcaaaaaacaaaaaacaaacgaaaacacacacacacacacacacacacacacacacacacacacacasacaayagtattgcaactagaaaagattattaataattatttatgcatgtagtgattgggctgtgagaccaaaagtacttgataaatataggaagtcatgataagtgaaaaggaccttttgttatcgttatctargtttgtagttctcaattccatgtgttcattcacagatactgcatgacattgaaacagctggtgtattaactaatgtatatgacagtccatctctgtacgatgatgtgaaagtgcagtttttctcttcagtgagtaatcacaaaatagcctctgccattgttcttgtctggtctaatgattttatttaagatttgctttactacaattcccaacaagggagggggagggggaggaaaacaataaatcagatctataacaaatttttttaaaagaacatatgtaatttgaataatttttgttcatttgtttttttctaaattgtaaattttctaaatttttctaaatttacatgtattctcaaatacatgtaaacacaaaaatacaaaataaacacaaaaaaagtaaaagccaagatgctaaaaaaaaaaaaaaaaaaacccaaaggtatgttttactgcatagcaatgattacattttgttttgcatcttttttaaaaaattaagaagttgagacagagtctcactctgtcacccaggctggagtgcagtggcatgatcatagctaactgtagcttcaacctcctgggctcaagcaatcctcccacctcagcctcccgagtagctgggagcactgactggaaagagagttakgtttgggtgactcagctaggtgaaacacagaggaggtagcacaatacaacacatgaaataaccaaaacagttttttattaattccagagagaagagggcagcacacttcgcagggccaactggaagggggagccatccaggagacctgtgctcgactgatgggtgggagcaatagcgagagagagggagggacctgagagtggaagcctttattgggatgtaaggtggtacctgagcaggtttcctgtggggaggtctaatttggtttaacacaagcagccatgagtctctrctgtgrctgagaggtggtcactgatatatccacgtggtccctgcagagtatgggggcctatggggggagtcaagtaggttatatctagctgtcccataataaagtggtcaccaggggaaggttgtataaggcagatatcgggatcagtcacatggagaaactgggagatgaactggaaactgctgagggtgactgaaccctgcttctgatatcagaaagtccaatttatatttaaaagggatgctgaggcaacaaaaaaattataagaattcactacaatctagttgggtatatataggcataggtccttagtagagtctgtttggcactatctaaaccagattcaaatagcagcatttaaattaaatacctatcatggaaaaaatactattccttgaaaattttgatagaaacagcaagagaatgcaatagcattttcttaaagcctcctcctttgtgtcttgagtgtattatagattgcagagtgccacatatttaatggttataattgtttgataaatataaaaaggaataaaggaaggaactttaatttctttggaatgattagttcttggtatcagttttactttgaaattttttttctttttagaatcttcctaaatactatgacaattgttcatttttcttctggttcaacacatcttttattcaaaataacaggtatgaatataatataaacccatagaaacagcctaatcttcaatgtctatatataaggcataatggcaagtcttttgctggttgtcataaacttaatttatagaaagcaaaaaatccttgagccatcattgttcattgccttactcctcttactttggttattttaaaaatacatttgttcttgagacccactgttgcagtatcctcaaggtccatgccatagaactgtgttatgagttcaaaagtattataatcagatcttaagtgtggtagtaaattcctcttgggagaagttcaatatgagtctgctcagcaccttcaatatatcaggtctctgtcggtaggtgctgatttaccagtgacgaaccaccaccaaattttgtgctaaagtaaggcaggacctagggaggcttcagctagatgaaaagctgacagacacacttaaatctaggagaagttacaagacacagtattaaggaatacagctaagaaatatcattaagtaatggtctatttaaatagccatttaaatgtggctttctaataactgaattgggaaatctttctgaaaaattattaattgggtttggagattattgttccaaaaaaacctaccatatttggaaatgcatttctcagtctagaagttctccactataagtagcatttgttttgtgatggtgaaaaattgggattttttttttgtatcaaccatactcttcaatacaaaaggacaaaatattttttaaatgatttaggtcagaattgaagaagtggctatgattatatgtggcatgaattgatagttattgttacatccagtcctaatcttttcttcaaatgtgaactggatcgaataactccttaagtccagcaaggcaacaggaaattaaacctctggtctacatacttgcaatgcaaaacatttaatggattttgatagagtgaactttggatttgacggaaatttttacaagttttttttttggatgcatacaaacattaaactttttcttctaacatgagcaaagtccctcaaaaagtgagacctggatgtagcttcatttgatgctgctcctcgaaagtggttcttgctaaaggatacagtctttttcctttaaaacactatgttcattttggagaagtgataagctagatcacttttattcttacttttatataaatttctaaagatttctttaacatttaaatttacatattacttggtaaagctgtttttgttagttatgagattgttgtttagccaaaaatgctaacttctatcatttagaacactaggcataagtgggttaaccaatttatgcctagtgttccattattggaatgctcagcatgtgggagttatatcctactgctcaaggtcatttccaaggtctgattgtaaaaattcaaaaaattgcaacctcacacataaattaaaagagatatagtattttattactgggttttcattcatgtctatcctgactgatttctgtcacagagagaaatttagatattttattaaacttggaagtcattaatgccatataaagcaatgctaagagagtcagcatgtgttactgatgtgttgctgaagattaaagtatttttaagtctcaccaaaaaggtggaaggagccaactgagacacaaaaaaggggctgaggttctattcacggtgagtttctttttttgtttcttccagctctaactaacgtgggtatccaactgcgtggcttttcggtgagccccaatataaaatgtaataattttttttctattcktargctttatctaccaagaaatgaattggataatccacatcaacaaaaagcatgraaaatttatccaccagaatttgccgtggagatactttttggcgagaaatgacttccaatgacgtagctggatccgattaagtatagtttccccttccccttctgggaaagaattaatgttctttccaacccctgccatgtgcatgttcatatgtcctaagtcttccttgatgatgtatctatatttatatatgtttatatatgttcttcataaatctattaaatatatatagawaaaatgtcagtgtttttcttcttttttgaaggcacatacttcacagtttccatcttgtatttacataaattgggaacacagtatgcaggaacatcaggcatcattttgaagaactttgaaatagaactttcatagcaaaaacttgagatatttaaaaattgtgattccccaacacccacttacatatttttggtcaagtatttattccctgctttggttcacatttgtaatttcagatttattagaaagctaatttatattttttcttccacttcatttacaaactgtctgttaacagattggcaacaaagactaagttttaaatccagaagagagaagtgtttcacacaagcagtcccccaactcccaacacacacacagtctctcattctgagcactaaataggtagcttacttgacaagcttcctttaatcacacacagacatgggggttggggtaagaagattgtggtaaatatgaagataagtaatctctggtaacttctgcttttgtttaaaactgtaagtgaaatcaaaagaaatatttgttcttagagtaatctaggtgtattattttgaaattcactacacctgctcacaattcacctaagcttgggaggactctgaagggaggttatcttttcattataaacactggttagccttatgtctacaggaaatcattattatttcctctttggtgctgggtgctactttttttttttaacaaatttttttatttgtattttttatttcttgagacagcatctcactctggttgttgagactggaatgcagtggtgtgatcttggttcactgcagcctcaacctcccaggctcaggtgattctcccacctcagcctcccaagtagctgggactataggcgcatgccagcacacccagctaattttttgtgtttttagtagacacgaggttttgccgttgttgcctaggctgagctcaaattcctgaactcaagcaatctgcctgcctcagcctcccaaattgctggtattgaggcatgagccaccacgcccagtctgtgggtgttactttattcaaaacacctttattgccactgtatcttcaggccatgattgtccttgaaaacattctatcttggccttattgaaattattcttatttgaatgattttccttttattgtcaaggccctcaacaatctagaccaagatgagttcatcaggaaatgaaaggtaacaactaataagacaagtgtcactgctaaaacacggtatactcattcctgaaaaacctggcactctacagaaaggactaaaaaaagaagcggtccatgaaaatacagtttgagagtccagggcaatcctgtccggcatagcaactttctaaccaacacactaaccgctcgggccacccaaatcagcagctcagtgtcgggagtttgccatagagctttttaatttttgagtggaaatagaaaaatacttgctctaagggctgtgggtaccagaatggcacagatgagagtagagccctgagccatggtgggcacgggaaggcagcaacctgccaggagccaagagcccccactagactggtgagccacctcgctgcagggggattttttctcctctaaatattccaaaaacgttccgactgcccatgcagcagcccagctaaggcctttttcctttactccccctgacctggctcctgctttgaggaaaagatcatagaacgtgctttcaaattcctttcatgttaatattatgccctgccattcatatgacagaaacatgtaggcacaacataggttacactatttcctttaaaattcacacagccacaatctacagagggcatattatgtcctgggtttaggtgaatagggaggaaaatacttagctggctcagtgaagattaagatctgtctttttcagtaccagaaatacaggaaggaaggaaacccccttttttattttaagaatttccctttttgaaataaggagattaccattaaggtttctcttccccagacctccaagacccaccaaaatttctggaaattatgagttgtcacactattctgctttcgcttattcaaagaaaactcatttaaggcctctttgggtattgctttcttagaatgcaaaatgaatgattctttggacaactcaagaaacttagatcagaatgatactcatgtcttaaaattttaactttaattttaaatatagggggaatgtgtgcaagtttgttacatcagtatattgcaccccggtagtgagcatagtacccaataggtagtttttcaacccgcacccttctccctccatccccctctagtagtccacagtgtctattgttcccatccgtatgtccaagggtacctgttgtttagctctcataagtgagaatatgtggtatttggttttctgttcctgcattaatttgcttaggataatggcctccagctccatctatgttgctgcaaaagacatgatttcactcatttttatggctgtgtagaattccatcgtgtatatgtaccacattttctctatccaatccaccactgatgggcacctaggttgattccatatctttactattgtgaatagcacagcaatgaacatatcagtgtgtgtgtcttttggtagaatggtcttttttccattgggtatatatccaataatggggttgctgggtcaaatggtagctcgttttaagttctttgagaaatctccagactgctttccacagtggctgaactaatttacactcccaccaacaatgtataaacgttcccttttctctgcagccttgccagcatctgttgtttttgagtttttattaatctccattctgactagtgtgagagggtatctcactgtggttttgatttgcacttctctgacaatccgtgacgtgaaacattttttcagatgctcattggtcacttgtatgtcttcttttgagaagtatgtgtcatgttctttccacatttttaatgtggctatttggtttctgtgtgtggatttgtgtaagttccttatagattctggatattagacctttgttggatgcatagtttgcaaatgtttcctcctgttctgtgggttatctgtttgctctgtcgatcatttctcttgctgtgccaaagcgctttagttttattaggtctgacttgtcaatctttgttgttattgcaattgcttttggggacttagttaaaaattctttcccaaccaggcgcggtggctcacacttgtaatcccagcactttgggaggctgaggcgggtggatcacgaggtcaggagatcgagaccatcctggctaacagggcgaaaccctgtctctactaaaaatacaaaaaattagccgggcgtggtggcggcgcctgtagtcccagctactcaggaggctgaggcaggagaatggtgtgaatccaggaggtggagcttgcagtgagctgagatcaccccagtacactccagcctgggagacagagcgagactccatctcaaaaaaaaaaaaaaaaaatctttcccaaggccaatgtcaagaagggcatttctgaggttttcttctaggatttttatcacttgaggtcttacatttaaatttttaatctatctccagttaatttttatatatgatgaaaggtatgggtccagtatcattattctgcatattgctagccagttaccccaacaccatttattgaatagggagtccttcccctattgcttgtttttgtcagccttgcagtatcaggtggttataagtgtaaggctttattctgggttttctattctgttccattggtctatatgtctgcctttgtaccagtaccatgctgttttgggtactatagccttatagtttgaagcctctggctttgcccatttgcttagatttgctttggctattgaggcttttggtttcatatgaattttagaatactttttttctaattctgtgaagaatgacattggtagtttgatagaaatagcactgaacctgtcaattgctttgggcagtatggtcatttgaatgatactgattcttccaatccatgagcatggaaagtttttccatttaattgtgttatctccgatttctttccgcagtgttttatagttcttgtagagatctttcacatcctttggtagctgtattcctaggtatttcattttctttgtggctactgtaaatgggattctgttcttgatttaactctcagcctggacattattggtgtatagaaatgatgttgatttttatacagtgatttttttatcctgaaactttgctaaagttgtttatcagttctagtagccttttggcagagtctttggttttctgggtatagaatcatatcatcagcaaagagagatagtttgacttcttttcctttttggatgcctattctttctttctcctgcctgagttctctaggtaggacttccagtgctatgttgaataggagtggtgacactgggcatcattgtcttgttccttttctcatggggattggttccagcttttgcccattcagtaggttggtggctgtgagtttgtcatagatggctcttattattttgaggtatgttcccttgatgcctagtctgttgaggtttttaatgtgaagggatgttggattttatcaaaagccgtttctgcatctattgagatgatgatatggtttttgcttttagttctgtttatgtggtgaatcacatttattgatttgcatatgttgaatcagccttgcatccctggactgaagccttcttgattgtggtgtattaacttactgatgtgctgctggattctgtttcctagtatttggttaagaatttttgtgtctatgttgatcagagtaattggcctgaagttttctttttgtgtgtttctctgccagattttggtattaggctgatgctggcttcatagactgagttagggaggagcccctcatccttagttcttcggaatagtttcaatagaactagtaccagttcttttttttttttttttagacagagtctcactgtgtcacccaggctagagtgcagtggtgagatcttggctcactgcaagctctgcctcccaggttcacgccattctctcgcttcagcctcccgagtagctggaacaacaggtgctcaccaccacgcctggctaatttttagtttttgtatttttagtagagacggggtttcaccatgttggccaggatggtctctatctcctgaccttgtgatctgcatgccatggcctcccaaagtgctgggattacaggggtgagccaccgcgcccagcctcagttctttgtacatctggtcgaattcagctgtggcttcatctggtccagggcttttccttgttggtagattttttattgatgatttgatttctgaacttgatatttgtctatttaaggtttcagtctctttctagttcaatcttgggagattgtatgtttccaggaatttatccatttcctctagattatctaatttgtgtgcatagagttgtttatagtattctctgaggatcttttgtatttctgtgggattggttgtaatgtcatctttgtcatttatgattgtacttatttggcccttctctttttttctttgtttagctatcacactatccatcttgcatattttttgaaaaactaattattggtttcattgatcttttgtgtggatttttgcatctagtctcaaaaaaaaacagcacttcaaaaagcacttcatttagtgcttttctaattttagttatttctcttctgccagctttgggatcagtttattctttttttctagttcccttaagtgcaaagtaggaatgttaatttgagatatttctaacttcttgatgaaggcatttagtgctataaactttcctcttaacactgctttagctgcatcccagagattctggtatgttgtgtccctattttcattaattgcaaagatttttttaatttctgccttaattaagatttt

SEQ ID NO: 97355 - DNA, 102115 bp, Homo sapiens
actaattacacttagtacttttatatcatgtagataaagaacctttttgaaagattggtttttacgtttcaaaaggtaagcatcacatcatctggataacactacaggttgcaaagctgcacatgttcacatgaagggatttaaagcactgggtggggaactaattctgattgacaaaactgtagatacaggtattagactaaacaacatcacttgccaaaggtacctactcttccagagaacatgaccaagacaaaaacttacatttctgttttttttccaggaacattttttgaatataactttatgaagtgagagggttcttcttagaaagattcagagcatctacttcaagtctcgcctttcaagttctaccctatagaacttgtcagatcatttttttctgcgtttaccttagtcaacttttagggttttgtggcaagaatcttaaacaagttgtttcttaatagctttcaacaaaatagtgatgtgaaaggatggtgtatactatcaagagtacagtgatcagttgggttggtggggagactttccccaagaatggtccaatttttaggtttcaacaaatcaccctatgtgtataagaaacttttctgttcaatcgccaaggagctgatatctcaatacttgctataaatttcaaaatacataatttttacattctaaatccttgcctatagggatttagtttcttctttaaattttttttaattttaagctttatcgaggtataattgatctacttagtttcctaaatagctttaaaattaagtccaaaaacaaatttcagataggaatttgaatattttaatttttcttttcacatttattctgctcatcagtcagttgcatggcacttgggtatgacatagttggtagcctgttcttgtgaaattaaggtgtaaaacgaggtaggattgtttcgtgggattattaagttttaggtatcttgttactgttttgaagcatgtattttccaaagctggaaaccatttggaatgtgtgtattgaccgaattttctttgtgcacattttgtgtgttaactggtgacctagaagttggtggaatgaaataagattctgatttactgaaatgatggacgttttacagtgaatgagctggagttaaactatggcaaattgagggaggcttaagcacaaggtccagaagaatagggggctattagatgcttgctttatttttcgcagtccagcattgccctgtgatattgtggtgagagagaaaagagaactgggccagaagattagagcacagggaggatttaggtttaataggattttatgaggctctaagaagaggttgtctgaggtaatttgacccaaaatgaaacaccctcctcaatactgctattagttataattgagggcacaaggttcacctctcttaaggtgttcccaatatttgatgagtcttcatccttagatggaattttacatgataagcacatttacagtaatagactttttatatattttttatgtatttagtagcagccaattcagggcattccaaagtacattctcaaacaatgaatttttctattggcagttgctcaggaaataaacaaaaaaaacctcaatcatggaattatatttactgtggctgattcctgtgctgtacgttccttaagtcaaatatgccttagtagtaaaaagaatcccatctgcaactagatttcttataaagatttttgtacaaaggccatcatccttctttaatgattatctgattacccctctccaattggtataacagttgtgataaagtacataaaataatgactcaagctgtaagagacctaagaaatcctactttagttgtaactgcttacttaagtgacattccaaaagaagagtcccatttttcactcaaggtttcacagctggttagagctagaactagagttttgggtccctgcctcctagctcaaagctcaggttcccaggttgggactttaaatttttagactttcaggcttggactgagccaacaactcttagccattaccctttgttccctactttaaatctacctatattctctagccatttccacaaaccaaccagagtaatatcaggagggatgaagaaggaggggtaggaagggagccagctgtgcttcccatcaagtataaggtagtggttttggtttggaaactcactgtgaaagacttggctttgcctcccttttatctctagcactctcctgcctgtgttcttgatctcacctttcttctgctccttttgctccatcaaaaatctttttcttgtatcttcaaattatccatgttcattggttcattcccattaggcctgccaatataatcacttttccttcaataaaaatgttcctctggctccgtctccccttaaggtggccattccatttctttcccttaagaatttttaaaaatagttcatcattagagagtatttatttaaacagataaaagaattgaaggattgtatgagataatatttaaatgccaagatgtttataatttaagtttagtctgatagtgagaaagggatatatcaaaatatagttattgaaagttcaggaggaaatgcgattttgacatatttttagcttttctaattattgtagctgtccaaatagtctgaagttgggtaagatgtctatctgggaatgaagtttttacactggaaaaagtgaagaaatttttacattggaaaagaggtgtgatttagatggctagaatctgagcttttatgattatatgatatattttataattctgtaaggtggaagcatatgttttgctttttgcatcgtcaaataaatatatttttgaaaaacagcaaataaaaatagatataattatttggccagttatccctgtctctaacaatatttaatataatttttctttccttattgatggaaagtatttttatatataatattaatgagatataaatatggccactcaataatgtctatagtcagttctgtctttgcagtgtagaatttatgctgaaatatcaagctattgtatatatattttgacagctcatctctttcttgcccattaccacaaccaaaaaactcaaccacaccacacacctacatgcacccactgttgcagagttctttgagtgttttttttgtgttggtggtttttttgaagaaagataaaaaaaaaatcactccttggcatctaaatggtttgtagagctctctctcaggcatgaaatttgagtcaatgtgcatgtgtgtctttacgggaagaacagactggatgtgtgccaaaagtggcaaggtttacttgaaacatttttgacatcacgtaccttagactgaagagtgcagagggaaagaaaggagaaacgtctgatgatgccatattcatgacagactcatattttagtgactgcagctgctttacctacttacagcttttgcctccattctgtcctctgttcttctcttgggagttttagcattggactgggaatatagagatttatattctatttctatcaaaactaacttgtgctgggcatggtggctcatgcctgtaatcctagccctttaggaagccaaaacgggaggattgcttgagctcaggagttcgagaccagcctgggcaacatagggagaccctgtctgtacaaaaaataaaaaaaaaattggacaggtgtggtggcacatgcctgtagtcccagctagtcgggaggctgaggcgggaggattgcttgtgcccaggagttcaaggctgcagtgagctatgatggcttctgcactccagcctggtgacggattgagaccctgtctctaataaaacaacaacaacaaccaacaaacaacaacaacagcaaactagtaagctcatgacattggctatttatcctgtctatactgcattctcaccgtttctgagaagattgcatgtaaattccttctgaaaactaacttgaaggatcttagcatatctttctgtttttgatttagaagcaattggcatgatgtatgttcctttcatacctttgaagaagaatctttgaattctggagctggaaagacctgagtcttgtagcttttcgatctctgggataacacaaaactttgattttcttcgttatgatcattatgtaacctaaatgaaaggccttgacattttcacagaaatgtagtgtgtagaataacaaggaagttgattcagaatcttgttttatctcttatcatttaaaacaaggctgtaaatgtaaatgtttataagggctagtgaggtaacctgaatgaggtgaaggttctggcagtaagatcacagggagtggcagggactgtggggacgggagaatgcgtaccctgcaaatgtgggatagccactcttgatgtttgaaacaccagatggacccaatagtagcaaaggactatggttgccactggacagtgtccactgaaaacaagtttgtagtatttggaattttagtttggggaattcaattttcataataaaatacagctgtagaagaaacacacaggcagttttcctggagtatgtgatttgtgtacttcttctaacaggtcgtcctttctatataccttaaccctcctccattctttttcaaaaatgtttctttcctcagtactatgcttgcaagtgttctgttcttatgtcccaaaaattctttctaagaccttttcatgtcgaatggttgccctcctactaacagaagtgcttgttttaaatactcctaaactattttccagtgtctaattctactccccacaaggaacttaacccctgagtctcctctgaagcccactttctcccatcttactgtttgtagggaggaatagccgatcggtgttctccttgtaatacccttcctattactgtgttgataatggctaccccctgttttcttttgacattacaagtctacaaacttttattatggcttttgttttccagggttctggtagttgtaattactttttttctgaactcttcccaatctgtacacgaaaaaaaataatattttgaattatacccagtccttttatgggctgatcaaactagtgagacaataccactgccttactgctttcgtcagtgccacacaaatggatcatattcaccgtacactctatgacctcaatttcttttttcccctacttgctgtctggtagtcaggatttctttgtattttttccatgtttcatttttcatttgtaagtgtgctaccttgcactcacacctaataaacactatcttgtttttgatggatcatttctatctctgatttgtcaaggttacttggaattccattatttttcagaaaagctagaaactttaacctagtttatagccacaaaatgattgagaatcctttcaattctgacagccattgatttaaaaaaatattcaatcaaattagacccaggaatctgggtgctgttttataacacctcccccaagttgcatcaagccgtttatttctcttgctgttaactcatggttttcctgttactgagtgtttttaaactctgcaaacactggtatcataatagtttggtgcaaaaataattgcggtttttgcccttgaaagtaatggcaaaaaccgcaattacttttgcaccaacctaatagtttcttacttgattctaggaactagacttgagcttgagtgctttagaatagtaattttggggggttgtggctggttgtagtggagagaagaaacccaataattgtttcatttactcatgtatcttagctagcattattattttgtatttttagtagcaaagtaggagaaaacaggagagcctttagattgagtataatatctgttttgtagatttttttctgtgttggactttgagaatgtctaagctttgatttaaatttaatagtcagtttcctatttaatttatgaacataataaaattcatttttttattattgccattacaggttttggaaggtgacaatgaaatgtgaagaagttacatttctcaaacttgaaagttagtgacggcttaccaaattttaatgaaaattaaatatgacttagaagcattgatttatgaaggcttatgatgtcatcggtttcgacagaaagcaaactccagcaggctgtgagcctacagggagttgacccagaaacatgcatgattgtatttaaaaaccactgggcacaggtaatgtatgaattccactttttttgctggtctcagtaaccccaggggcctccatcacactgaatcagggttttctacctctgtgataggtaactagattgctagaaacacagggagggaaactctttcagataggaagaaaagtaactttttcttcttgctttcctagaataggtatctggtcaaaaaccatggttttcacaaaagcaattagggtacatgcatgttacttggatatttttagaagaacagcagttgttctttaaagtgacttttatatcgctttgcaatatacttgaccataattatatcytctctctctctcttccctgctgatttccttccagttcttaagctctaataatactaaaatacacatttattaaacatttaccaagtactctgttgagtacttcaaatgccttatgtcatttaatcttgtccacaaacctgtaaggtagctgatgttagtttcctcattttacagaagagggaatagaaaattaccgaggttaaataacttgcttaaggttatacaactagtaagttactaagcccattacttaggctttggtgccttgactccaaagctcgtgtgtttgatctctgtgctctaccattttggggctggtggtccctgtgtaatttaatgaaaaacgcctgagtatacctgaatatatgtcttcattacaaagtgattataaaattttttttgattatttactttgacttctctgatctgctgtgtggataattaagggttgaatgttcagaaaatttactattccgcccctttccttagggagtttacacatagtaaaataaataaaattgtcattctttactacttgcccaacattgcactccccaggtgagctggtaagtggctatttatgtgacagttttttaatgactacccagttccttcttgtggccggaaacagcacactggttaaagcactgagcctgtaaatcacagcaattataggggacacagtttagatcaaaaccaagcaaaatcaattctgcttctgagccgtttatactttgtagcttcttgttactatctagtataaaccttctccgattttttgtgcattctctgaccttttaccattagaattttaatggatttgctatggacattagggcacatatgctttagttaagggaagaaagtaatttaggagttttccagataattagagtaataacctttggctttgcacttttataaatattttaaagcagtatctccaaggcgaggtggtgaatcctaaggaatgagcccagtagttcattgggtgtaggaagaatattttagaaggtctgtttctatctttaccttttacaaatttctgttttgtgtttaaaacgtacattatacatttgtatattagtgtctgtatgattactaatttatttatttgtgcttatttaaaaaatctattagtgcataatcatatgtttttaactgagaacattttcagctccagtcatttcattaggcttaggaagtctatcttactacgtaatyttcgctcccagcccattttgtttattcgtttgcgcataatacctttgattataatcatttctgctggggtaactgtgatatgatccatttagtattctgtgccacttcccaaagacatgatatatcatcaacttcttgattatatgtaggtgggtcatctgccctgtcagattctgtcccaggcaggctttctccaaatgtgaggaatgtgccagtacattgtgtcacattgttgaaagactattggtcccagaatcatattattcatttccataacaatacaaatgacttcagtattattgcacattttgggttctctgaagcacagtacagatacatagtactctcagtgcagacaagtcttgagttgaaggtaaggataactttgtcataggggatactgtttagttgttaaatattttcttttataaagttgagacactcatggtcttactgttggctcagccatttctttacctttggacaggtgtttttaacctttttttaggcttgatgtttccttttaaataaatctggaaaatgctctcagtctctgcctacagaggctcttgagggcctttctgttatctttatgaatgaaaatgctggttgaagaaatctatgtgaatgtaaaagtgttattgttcaatggagatttactgagcacacactccaggcatgtcgctgtaggcatcacacgtgggacttgagaatgtataagccttggtctgggctttaaaaaatgtataagctaattcagatgacaatgcaagatacattattacaaaatgaataaccatgattacaggaattaagtcaagagaaggggctattatggctggaaatggcctgggaatggagaaagtgagattttgctacgttggctatggaaaaggaaggttttgatgacagacaggaaaataatatttcagagaatggatactaggaataaatgctcaatttcagcttttttggatggtacatataaaagaggggaaggcaaaaaaatcagagccaggcagagatgtgggaccaaragtaagataaggaatgagatcttcagctgggggaaatgaatgctacttatttgttgttttggagtttcatacgttagctcttggctgtgagttgttgggctggggtgggtgaagagcagttgcagaggattgggaaaagagctccagtttgacataagctcctaggcctactgtgactgcagcccctgggttcacctgaggcaacccaagaaaaacctgtaaggctggtagggaatgaggcatagacaaagctgggaagcattttatttgcccaggtgtctgttacctgcccagtgtaatgcttttttaaatgttaaattagcaaaaagtgttggccgggcgctgtggctcacgcctgtaatcccagcactttggaaggatgaggcgggcacatgatgaggtcaggagtttgagaccaacctggccaacatagagaaaccccatctctactaaaaatacaaaaattagccaggcatggtggcgggtgcctgtaatcccagctactcaggaggctgaggcaggagaatcacttgaacccaggaggtggaggttgcagtgagccgaaattgcgccactgcactccagcctgggtgacagagcaagacaatgtctttaaaaaaaaaaaggaaaaaatgaaggcaacaaaagcctgtggtatcccaagttctgtatgttaggagacttaagtataaattcaacataattaacttgtatttgacaggttctgttctgctatttgttaatagcctcttttccagagcttgagttaaaaagcaaacattgatggaggagatctgcttgcccacttataccttagagcctgtcagaggcagctagttatacaaccagccatcatccaagcagtctgtgattctggagagttgccagggragagaccttaaatggcccagtggtgcacttgaggttcccaactgcttctgggtccagtgatctcatggcatccccagaatcattctagagtagactttcaggaatggttgcattccaaatagtgacactgaagagtctgggctgtagaaagtagcccctgacttcctgtcaccttctgagatgccattttatgctataagttgccagagcaatgaatctcaaacccagatctgtctggttcattcctctggttgaacctttcagtggcatctggccacctacagcccaggatgacacacagaatttgttacgtcctggcttctgttactctctgcctctcatttaatctccaaaaatgcaaagttgcttggggttcctagccaccccctctcctggcagcgtccatcatgctgtttcatccctctgtgccttaggcactccttcttctttctgcctgaaatattcctcccactggttaaatgcctgtccttctacaggcctcatttgagggatcatttgctctaagaaaccttccctgccctctttcatgctcccaccccatgttcaagcattaacctgagtattctatcactcttacaccaaccaccttttaatttaattacttatatttttagagagagagtctctctatgttgcactggagcgcagtggctattcacaggtgtgatcatggcacactacagccttgaactcctggctcaagagatcctgctccctcagtctcccaaatagctgggactgcagagatgtgccactgcgtgtagcccaaccactttttattaaaattacatatacagtatcttcttcacactcattacgggctcctcaagatcagaggccatttgtaacttacatccccattgcccggaacagagtgtgacatatagtagatgttcaataaatgattgaactgaaaggcagtcagtatgaaatacaagtttaaaagagctaggcaacttaggaaacagctttcaacatacactaattttaaaacattgtataatttgtcaccggcaagatctttggacttggcattaaatgatctggaagagtgtgtgtatatacttaatttttatagtagtctattagaacagtttattctctagtagactgttgtttttatctcttgcctttgtttctttgtttttatctgaatggaaaagaggacagaaatagtaagaagcattagcccaccaggcaataaactattcaactagactgccatgtgaattaaattccctacactagttatttttgatggcacaattgtactttctgaagcttcatggaccttgctctattcattttctatctgctcctttcaagcattgaattccaaaaggtctctgctcttagagccaggagaacagaggaggtgggttaaaacaaatcaattggaaatgcacatttctgtctttgcttctagttagttaatagcccagaatgacttctttctaccttcagcctttaaaaataagctgtttaaaaattttttaggctaagaaaatatcagagctcaaataaagtaatagtgatggatgaggaaaagtcagtgggtttagtaacctttttcatcttggagggggtagggatgggaaaaaacagaaccatctagattggttaattaagtcaaatgtcttcccacaaaaatgaaaaacagataatatacttgagttatggtattttgtgtggagctccaagtagcccgaatctaaagtctagagcatccatgcatggatttgacatgtgtactgtatttgagtctcattcccttgctctgctcatctccactcttttgctctgtgccttgtactagactaaatgacagagaaaaattaagtaaagcctttgagagatgaacagttgggacgtattagagaactctgattcattttctaaatatcttaktaaattgatgtttgttaacatttcaaaaagttctctctctcttccaagacttacaggtagctctagccttgacagtagaaggtaaagtgaaccaaagttatacttcttaagttagatggccgaggcattaacttgcacttctatcagactctaaagtggttgagcatggccgggtgcagtggctcttgcctgtaatcccagcactttgggaagccgaggtgggcggatcaccaaaggtgaggagtttgagaccagcctggccaacatggtgaaacaccatctctactaaaatacaaaagttagccaggtgtggtggcacatgcctgtaatcccagctacttgggaggctgaggcaggagacttgcttgaacccaggaggcagaggttgcagtgagctgagattgcaccattgcactccagcctgggtgacagagcgagactccatctcaaaaaataaaaattaaaatagaaatacaatgcttgagcatgttgaaatgtcagcagctctcttactgtgtgcttggtggtaagtttgatttttgctgtggttgaaattagtgttctttgaaatattattatttggatcattactcataaggcctttccataactgttttatccaagatttaggcaagcctctggagctcagggctggagctgacattaaaaaactggtgttaagtgaatacgtattataaagctgttatcttaatataaaaagaagtgacttggtagaggtctccctgtggaaacagatgcacaaggaacacttcatactgaaagacacagctgttaagtaatgaacaaggactgtatggaaacttttgtgtagttatttggtacattaagtggaatttggctttagatggctaaatcttgcccttcagtgtgttggaaaatattgcatagtaacttgtttttttccacaatgccaccttattttagcattccaaaggatttggaagtatgggttttacacatatgactttcttaaaataactaggctctaactttggtagcataaataattacctactgatacatgcatgtatgtaagacatagaataatattaagtggaatcaaagctagtctcctgagagagaaacacttgtgtttatcctgaagggtaatcatttgtagctgacatacaattaagtgatttatgtagagccttcattttgaaagcatttgcacttcctgtttagaatttgtggccatttgaaattcaggccaattatcattgggtcacaggggccatcataagggataaggataggagtatctgatactacttagtgaaagaaatacgctatttattaatcttatttagccccagtaattctcacatttttaagtcaaatggctttgaaattaggttaaatttagctctataaattcgatatttttaagagcattgttcacactgttgatttttatgtgtttctttctttttggaattgtgatactttacatttaggatcaatatgtgatcaaggctaatgatgcatccaaacacacacacacacacacacacatacacacacacacatgtctgcgtttcttaaagtttgtagatcaacaaatgtctagctatgatccgcaaaacgtttaagttgctatttctgatttcagctggtttacttaattaatgagcgtgggctttataaggtgttgaggtgttgattagttttttaaatggtattttcagcctaacaaagtaaatttgttttataatttggaaatatttgcaaagtatattttggttgctttcattcttttacctgctgagatccctctggccccattaattttgttttttttctcctgagctgaatccctgagactgtctagatagctgagaagaagccaggtatgggaaatgagtcaaggttgagagtataagacagctggtaatcaggagtagaccaggccgggggagccactgtgagcagcatgaaatcgtggcatccatagcactggaaggtaaaagttggtatgtgggtggaactctcagcaagcagaaatcagggacacagaaatattggagtttgatgggagtgatatgaaaagagggcacaaaaggaaaaaataaggaaaagtccaggtcacatcagagatcagtttatagaaactgaaagaactatgacactattggagtgacaaacttgggacattgggacagaagttctttggcatttcagtgcaaattgtgctctagtcaagaagcttcttaggcattccctgccaacataggaaccagtcccaaggttgggccaccagagcccgcttgtaaaagcaggtcatgggtgtgtctgcctggaaaggaaaaggaggtagcctgggaaggtcctaaggagagaggttaaggacatgtggcaacacaagcataatcagcactttgctgagccttgtgtgttccatgactcacatacattggttataacacacccatcttccaggcagtaaaaccagtgggttagagctgggtcttcaatgtgtctgctccatctgaaggcagtataagggaactactataaagagggtaaagatgcttcagtttaaaagctgctaaacagtttgcattctgtataaaaatcttagttctctttttaaagtttttcatagcaaaaagaggtctgtttgtaaaggattgaattggaataaataatataaatgaaagttaatgagaaaaatacaatttatggttatgtaaatagacttttgctgtatctttcatatttgcatgcacatatattgtatatataaaatataaatacatatgcatatttataaatttatattgcttagaaattgctgagtcttaagagatctctaattgttaattgttttaaactcaatggtttggtcttttttgggcattagtacatgattactttgtctacctttgtttttatttaaattatgaaattaggtaaacttacaggaaggaataactaattaaccttaaaatctcatttatatctctttagactcaatcatatatctacttggcaatgtatttgctttttaacttacattttaatgatataaaacgaatttacttagtatttatttttgatgggtctattgtatggtgatataacatattttgattctaattctcttattcttgaccatttgagtcaatagtattttttttttcattattggaaaattgaacattttttagcaaattatttttgggttgtttccttggggcattttccccaaagtcagattaacaagtcaaagggcaggaacaattttatagctcctattacatattgccatattgttttccagaaagattgagctaatttgccactccaccatcaatgtataaagcacagccccagttttagatagtttagacagtctgggcacacatgaaaagtataattacatttttaccctgaggcctagctgtaaagatagctctcctaagtaaactcaatatatggactttgaaattatagaactgataaggcatgaattttgttcttcagaatgtggaggcttgaagttagggacttttggggctggaccatgtgtggtgtggaggtagagggtccctttggaccagtgtggtactgtgattgcattctattgagatgttggtaaggcccagaacaaagggatgggagagaaccaggtcccagtgttgctgctgctaggaaggtcaccaggtgcaaggaatcctggagggcttggtggaggttgtaggatagtgggtgcactttggagtcaggcatgcagcaaagaagaggatgtctagtggctgtcttgtggccactagtcagtgggccaggtactccctgggtaggggctagccaaaggccttccttattaaaaatgtcaacttaagggtgttagggtgatttttttgcctttgtgacacagcattatcaactttataatggaagtcaatagagattatactttctgtggaaattcttttattctgtaaggatggacttgcctggtctataacgatttttttccctgtttctgacaagggagagacttagacatttccctgagaaacaaatttccctcattgctcatgcatgcattatccctttgccagcttccccaatgacttgcaaaaattccataacctaagtacttgcacagaacatgtaacagcacatcataggactggacctggagggtactgcaaaagacacatagattccatgcaattcagaaaggcaaaaacggacaaagataaagtcattgataaatgtttggttgtttaaaaattatcgtatgtgtatattttcaagggagtaaatggaatgaatattataccagaaattctaagtcatgaagttaaatggaagttgagataacagattgttttagtttccaggtcgcaaagtggaagtaagtatctgttggcagagaaaggtgagaaaccttcagatgctagcagtgggaaaggagagaagctgactagggctgtgaggtgacctatttagggatttttatttaaattgttaattgagttttttgtggtaaagtatatataacaaaataggccaccttaaccaattttgttttttgttttgtttgagacagggtctttctctgttgcccaggctggagtgcaatggcaccatcaaggctcactgcagcctcaacctcctgggactcaaatgatcctaatacctcagagtctcaaggcatgcaccaccacacccagctaatttttaaagttattttgtagagatagggtctcactattttgctcaggctggtcttgaagtcctaggctcaagtgatcctcctaccttggcctcccaaagtgcttaattatcagctctatttccaaaactttttaatcactccaaactttaggaatttgtttcataattggttgtctcagaatttttaagcttaaagaaacacagcattcaaacccttcattttttagtttcagtacatgccatatgctagggttgattctactagttgtatgtctcttgtttatcagtttcctttaatcttttctgttgctgcatgtttggttgaagagggcatccatccaagtagggaagggaggatattgttctgtcaagggcatatgagtagctgtgttcctctgctgagatctccaaagcaattctatttgtaggagaacatgggtagtatggtttccttttgcttatttaatgtattttaaaattaaaaagcaatattatacatcaacaatctagaaaaaaatttaagaatttgtcacgactttgaacatcaaaatgattctttttgcatatttttttacatacgtctttgacataattattatgcatctaacatctacgaatagcttgcttttttcatctaacatatcacttacagtttctcattttcctcagttatgttcataataaataatccaaagaatgcatgtagcttaatttatataaccatactattttcttcaatatttagattgttgaaatttataactgtgtaagtaaacatcttcagacatcttctttctatagtttaactccttcattttagtgtttgagagggagacacacacacacacacacaatgcccacacatatcttgtgggcagtggctcctgcatttttggtgacaatttggtaaaatcagtggtgatatgtttttgtaattatgataaacatcagatggatgacaaatgcttgacttggttacaggttgtgaaaatcttggagaagcaygaccccttgaagaacacccaggcaaaatatgggtctatccctccagatgaggccagtgccgtgcagaattacgtagaacacatgctcttcttgttgattgaagagcaagccaaagatgctgcaatggggccgattctggaatttgtggtctctgagaacatcatggagaaacttttcctttggagcttgagaagggagtttactgatgagactaaaattgagcagctaaagatgtatgagatgttggtcacccagtcgcaccagcctctgctgcaccacaaacccattctgaagcctctgatgatgttgctgagctcttgttcaggaacaaccacccccactgtggaggagaagctggttgtcctactcaatcagctctgttccattcttgccaaagatccatccattttagaactcttcttccacactagtgaagaccaaggcgctgccaacttcctcatcttctcccttctgattcccttcattcaccgagaggggtcagtaggccagcaagctcgggatgcattgctcttcatcatgtctctttctgctgagaacaccatggtggcccatcacatcgtggagaacacctacttttgtccagtaagtctctttccttggcatgttttccactcactcccttttttctcttctgttgctagtgatgaatactttcttactccctttttttctcccagtaagttgtacttggcacttcctatggaaggatgtttagaggaaatctttggagggagcagacgaatctaagttgagacgctatttggctgagcagcatcagctcatcataagccaacaaaggaggctagatgtgttaccatttttggttaatttttactgcattaagaatgattttagttgttccaggagcatatcctgagagattggtaaaacctgtgctttctgattcttagcttttcaggttgattttgctccaaggaatcatggcatgtgataagacctccactgctagtttcacaaagtaatttgtttctcagcaagaaaatgaccactagttttagtgtattttgttgtcataggaacatgggggggtggagtgggagttcaacagtcagttagtgtgcaggggccacgctgacaacaacaaatgctggcaagatgtggaggagtagaaactctcattygttgctgatgggaatgcaaattggtacacttactttggaagacagtttggcagtttcttactaaactaaacatactcttgccatgtggtccagcaattgcactccttgatatttacctaaaggtgttgaaaacttatgtccacccaaaaacctgcacatggatgtttatagaagctttatttataattgccaaaaacttggaagcaaccaagatgtcctttagcaggtgaatagacaaataaagtggggatatatgcagataatggaatatttttcagctaaaaagaaatgagctggtaagccatgaatagatatggtggaacctaaatgcttattactgagtgaaagaagccaatctgaaaaggctacctactgtatgattccaactatacgacattctggaaaaggtaaaactatggagacagtaaaaagatcatttttttcccctgagcattggggcagggtgagggatgaataagcaaagcacagaggaattttatggcagtcaaattactttgtatgatactagaatggtgggtacatgtcaatatacatttgtccaaacccatagaatgtaaaacactgagtgagcgctcatgtaaactatggtttctggggtgactataatgtgtcactgtgagttcatcagttgtaacaaatgtagcactctggtaggggatgttgataatccgggaggctgtgcatgtgttggggcagcggctatgtgggatatctctgtaccttcctctcagttttgtcatgaaccttaaactgctctaaagaaaacctcttcaaaacggcagttttgagagggagctatacgtggtttgggttttagcttatttgaattgtttaattcaattgtgtaattctgctgttaaaggagagcaggtattgtaacaaatcaaaatattcaggtggttcacttgatcagtatgcaaaaggcaatttagaaaataccatttacaaaagcaacataatcataagatatcttaaaataaatccaacaaatacatgaaaggcctttatggagaaaattataaagggcataaaagatctaaataaatggaaagctctacagcttgtagatagtgtatagatgagacattcctgcaaattataaagttgatgcaatttatgttttaaaaagtttttattatgagaaaaaataaaatacagaaaacttaaaacactaagatgaacactgcacaccacctagattcaaagttgttaatattttgccatcctttggtattttatgsttttatttgtttttgttgtaccatttgaaattaagttacagacattagatactttagtctgtgtttcctatgaatggggatattctcccacataaccacaatactgttaytgtacctaagaacattatacaataattccttaatacgactagtatccagttctcctactgtgccccaaattacttccatagtttttttctccccatttgtagagtccaataaaagatatccatctagctatcaggtctctttagtctccgttaatatagtaacaacctgccacttttcttccccatgacattgactttttaagagaccaagccattatcttataaaacaccccacattctgggtttgtttcttttgtagtttgacttgtccctaaccctgcatttcctgcaaattggacttagatctacatgcccagttaaatttaggttaaatatttttggcaaggttactttacaagcgatgctatgtacttattgcattacagcaagggacctgtgttaagttgtcccactattggtgatgcattgagataccagttaatacttatcagagtagtaagtattaagtggtaactgtgttgtcaagagtgaaaaaaacaagaacttttgagaatataaattggtatagtaactcaggaaagcagtatggcaatgtttggtaaaactgaatatttgcctactgtgtgatcctgcaacttcccttctagatatctggcttggagaaatctggcacttatttacaaagatacatatacaacgatgttcaataaaacagtgatttgaaaaacagaaaaatataagtacgtgaagtgaaagataaactggtttattcatacatcagtggaatacttttcagcattcaaagtgtatgaatcatgtgtattatcatgtaactatatgtatgaacagcagtaaatcaaaaaacatgttgaattatttatttatttatttatttacttatttattgagacagagtctcactctgtcacccaggctggagtgcagtggtgcgatctcggctcactgcaacctccgcctcccgggttcaagtgattctcatgcctcagtctcccaaatagctgggactacaggcgtgtgccaccacgcccaggtaattttttgtatttttagtagagacagagttttaccatgttgaccaggctggtcttgaactcctaacctcaagtgatctgcccgcccagcctcccaaaatgctgggattacaggcatgagccactgcgcccgtccagagtttacataaaattttaaaacacagaatcttagtgtatgctgttttttggatacatatgtatacagtagaagtacaaaataaccacaaggataataatatatgctaagttcaagactgtggctttttgggggtgaaggaagggaagggatggtaatgagattggagtagggtgcagttctatttgtaatttttattgtttgaaaaaatcagagtgttctgaagaaacacttggtgatgggtttctattatgttttatatatttttcatatttcataatttaaaaatttaaatatgacaagaagatttccatttaactgcatcataagcagattttagttgagcattgcttttataaaaacatattttaaaacactgtacagatcattaaagttggagggaaaacaacatctccagctgaccttgtttgctagaatggaacacgagcttcattgtgttaagttgcccctcaggatagatcccataatctcatttgtacccagttttctataattacatctgacaacataattaaaaaaaaagccctctttatgttgaagataaaagcatactctattaaccatccagctaaggacaacaattgagaaaaaggtttctctaattagtatgattgtcaaagtgtgttagcatcaggctgttggaacagtaatgactctttcaggaaatcggaccacttttggaaacctttactgttatagttgataggaagagcttgctggttctgctgcctcatagctcaagatgtgctttcccaggaaaagaaggagattgaagatactctagggaacaatttggtgccaacaaaaggatggggactaaatgaccctgtcacttttttttttaaaaccaaatattgatggttaagcccatgccactgttatatattggcaaatgtagaaaacagtgtgtacataaatcaagtgatgcaaattaaagcaagcgacctttaggtacacagccacaggtagaatgttatttatcccgtatccaaaatttatgagattttttgttttagcaagttgtatcaaatagtccctaccaggtgttatgctgcgagcttcagactaaagccatctgccaaaaatctttgtgtttgctaaaattaaccagatatcattagatgtttaaagttaaacattactcattcactgctctgtgcatgtcatctttctttctttttttttttgtatgtcatctttctttccttcattggaaacatttctgtgcgtaaaacattatgctaatcttggtagatgcattattttctttaatcctggcaacaacttagtgaagaaatggaaatttagagaactttaataactgcctgtcagtggcagattctggttcaaaactgcatttgtctgatacttaagtccttggtctcagcaactgccacactatactgctgccagggaagttgtttgcttttttgtctgttgttatccttgtggttttacatggtgattagtttcttttaaagagattcttgagggaaaataagtgaaaaataagtgcaaataagtgaaaaatgggttaatgcttaatgtgttgggaataaatagaatgttttgcaatttttttgtgtgtgtggatgggaatccaagaatcaatgaaaggctaaaatagtggatgggaattttattttaaatgagctgttgaatacatctatatttaaacttttaataatttaattctaagttaaaaaatgaaatttaaaagtaaatagaatgtgctattcatctcttaacctagaaaagttagctacagacctgttggaatctttctttttccttatcctgttcccacagcactccgtatccccttgggtagtaattatctttcttgcctgtattagtttatcagccgtcttctccatctttcctggtccaacttgttcactactctttccccaggaccaatcttgcatatgtctgacccacagtctgtgttctagaaatatgtgcagtctgggtgaatgaatctgaactctgagcgcagtctaggaagggaggatataaataccataaagatttagaatcttgtttstaagactatgyaatactctttattccgcagaatattttctcccctgtttctttgccattctgaaggagatagcagaggcactttttgtagtggcaggaacatggcaggacttcttattcagctgtcacttctgtacagacaatgtccttctgttcygggagtatccttatgcatagagagtatccttctgtacagggactaccttctggatgggcaggcttctgctcacatctcagccatgccctttcacaatattcattttaaaaagtgaatattacatatgtgttatttttaattactgtcactgatgtatgtaatttgaaaattaatgttgctataattatattgatatactgagtagttattcccagctttttagtcagacaaattaagcctgtctttatgaattcatcctcagagcctcaaagtggttaagaattcaggagtatgcagaattaaagcctttgttctgtggttaatttagcatgagttagcaaatgtaattgatttaaaaaaatgtggcatcaagattagatttctcttcgaggagaacttttggtctctgttctcttttgccagaggtttctaatttataagaagcaactcatttgggtcacattcaaaactggaattaaagtgatttgtatgggtatgttcactttaaataggggacattctcctttgggaccaaagatgccctgattttttaaaaagagataaatgtactgtcttgtttacggttgtattttccgtacttaacatagtacctggcctgaaataagtgtttggtattttttttaatgaataagtaaatgaatgaatgattaaaggttgccaggaaatagaacagagaaatgtatattatttttttgatttctctagtactgaaatggttcatctgtttgtcttcttgytctttatactccactgggggctcctataccatctccccaacccctcctaggccctcccatgacttcatatggtctctccatgttaacatctgaaactcaacatacctgactggacaaatcatccatacctccagtgtggacttgaatgaacaagtcagaccaggagagatggagaagataggcaatacactaatacatgcaagaaagatgattgctacacagagggatacagagagtgctgtgggaacaggacaaggggaaaaggaaggcaacaataggtctacagataatttttttccaagtttaacatacctaggcccacacctccttctgactttctgtttgtgatgccaggcattgtggattattttgtcatatctcatctgtctaaatctccctttccttctctgtctggttcgtatggcttgaggtcccatctacatgttgatggctccgtctctagcccagagctctcttttaagcatcagccccacgtatctgaatactgggctctccatttggatgccccacacgctcctcatgttgtcctataaaaccctgcaggatctgattcccgtttaccttgccagcctctttctacctgtaattctgcactctaacaatactgtgcttctcttagttcctggagaataccatcttttctttctcctttgagcttttgtatatgctgttttctctgcttggaatattcttccccctactctttttctggctaactcctacgtactcttcaccagcttagatatcacttcttctgagaatatttcctgctgccaaccctcgaaatctgagtaagagtcttttgtaaatccacaacaccatatattttctattatgtattctgagcatttctaacactgttttaattgcccgttaatctctcattagacagtgagatcaatgagtatgtcactatttcttttctgggcctgcctcattatattttcttgaatgtttccatctcattcgaggccattgtcacctcagggtttgtgctagagcaaagccttttgtagctggcttttttttttctttcgaggcactccagctctgtcggccaggctggagtgtagtaggtccaatctcggctcactgcaacctccgcctcccaggctcaagggattctcttttgcctcagcttcctgagtagctgggattacagccttgtgccaccacacccagctaaattttgtatttttagtaaaaacggggtttcgccatgttggccggactggtctcaaactcctggttcaagtgatccactcacctcagctccccaaaatgctgggattacaggcatgagccaccacccctggccccatagctggctcctttgcattcaatctgtgccatccctggccatcttatacatatctagcaagtcaggatctccaagttgctgcttagtcagtatcacttcccagctgggaggcctccagtactatgaaattcattgcatccctggtttgatattccacaaggtaaaatcaacaagcactcagcattaagtatgtaatcttcctacatttctgtctctattaaaggcatcaccattttcttggtgaccaagttgggtaagttgacagttttgagttcttaccccacttaccaagcccaaaggctgtcaatttaaattaaggaccagaacactaagggaggaagcaagccctaagagttttggattaatgccagaccgatagatgtcatggttagatcaccctcatattcaccttccatgtgatgctcaaattttatttcctcctctcttttcctagtgctgatgcctccgtgtagactcactttatctctgcttgaatcttgtcatcacatctaactaactgattgctgacccccaattctttctccttgctattgcttgtgaagatcaaatgagaaaatatacgtggaagtgctttgtaaactgcaaacatgcagctgtcagtcgtgacctcaagcatgcaaggaattgcatggaatctttcccataaagctcatggttccaatgtatgtgactttctgtcctggaccacctcaaaacaggagtttctcctctagactggggtatgtgccttctctgtatttgcacttgatgtattgtactataggatactgtttatgaatttgttcctctcctgaacttcttgaggccagaataatattttattcatctttgcgtgtactcctcctacacctagcccagcatagtgcctggcacatgagagatgagcaacccataccaaccatgtgtatattagccagatagttctgatattgccattccttctgccagagttgtccttccctactgtcttcacctgtttgcatcgtttttagctggctgacgggctcttatacctttaataccttgctacttaaagatatagttttgggaccagcagcattggcatcacctgtgagctgttaattgcaggttgagaactttggaaaagcatttattttgtttttatttctgaacacaggtacttgcaactgggctcagtggtctctactcttccctgcctacaaagctagaagagaaaggcgaggaatggcactgccttctgaaagatgactggcttctacttccttctcttgtccagttcatgaactccctggagttttgcaatgcagtcatacaggtaccagagcacaataaaggatccctttgctatggcttcattcagagcamaagcactgcaaasgattaattttaaaacgttcattttttaaaatgttaataaatgtttatggaatattggtgctttaagccaattgaatgtccttgaatgagtgaaaatgttagtttgtaggtttctggaagttttaactgagaaaaaaaatgagtagattttctttatcttctttataaattaattctgttttgattatctacttaaccatcaaaaataagttcaatgcctgactcattaaatagattatttttaggtttctaagtactccagattataccgcttttacttcaaggtcttcttgggaatttacaaaggagaacactttattttgcttaatggcgcatactacataaagaatattgttatcctgattgaatttagaagaagttaagcattttcattgcaacacaaattaaattctctttgaaattgtcctgtttgggagaggaaaaaagcaaccactgaattcttgtgtatttggcttcttgattagatttttacctttagatttgttgttactgttttcaataaaaatcagattttaagtatatttaaggatgtggtaagttttcataaaaaatattttagttccatatagcataaatattaccttaatattagatttattaagaaatcaagttttctttctttttttttctcggcctttttttttattattatactttaagttttaggatacatgtgcacaacgtgcaggtttgttacatatgtatacatgtgtcattttggtgtgctgcacccattaacttatcatttagcattaggtatatctcctaagaaatcaagttttctttatagtgattgtaggatgaaagatgttagttataatctgtttatctaccaaataaagaaatagcttctggaagaaaatacaagtaaattattttagttccatctcatttttattgctaagtcaaagaaagttttatttatatataagaaaaatggattacatcttattttttcctttaatattgcagtctatcaacctatcaacattttcttgcagaagtttgtggaaataaaaaagatggaactactattagttcttccccaaaaatatatacacacagagagattatcagtaatttgaagatctagcttcactttcctagaaattgctttttactttattgtttgactttctttctctttttcattttcttctttttttaaagaaagagaaataaagctaatgggcatggtaagaacagggaaattatattatttcatactgcattttgacatcgaaaccatatacttttaaggttttttgtttggggaagctactgaaaaggttatttatgaaagatattagtagagggttatctacactaaatatattttggaaatcaaatatgagaagtattgtacttctgataatgttttccgcttttgaatattatctatttttctgaaaatatttttaaatgccttttctttaatataaatgactatcaggaaatacatatttaaaatgagraaatgttttctgctagcaaaataaatgtatttaattgttttgacagttatactcagtttttaaaattagttacaggttgagatgtgatttagaagaaagtaaggggcaaaaattatactttccagtttgttaactttaacaaactggatatgtttaacacactggatatggtatgtgtaagtatgaatccttatacatactcagtctatttattgtcttttttccaaatacgcagtttaaaattaccaatattatgtttgaaagttcaacttctgcggattttaaccaaggtgtttatactggaataagctatttgaaaggcttatatgacagtatgaggtctgatttgttctttaatcacagaataaatggccaaaatgtggatttcctttttgagttcaggatgtacacagaattgttttattttaagaactgaagattgaactctttgcctttttcatgcctatgtgcctctctctcaggtggctcaccccttgattcgaaatcagcttgtcaattacatttacaatggatttttggtaccagtcttggctcctgctctccataaggtcagtgattggctcatgtaatcttctgtctctataatacaagtgatggacwctgaggagggtaaacacagtgtaattgatttgatggtgattttagcctgatttttcttttcattccgtctatatttcttagcaatatcaaacacaggtattaaaatggccacagcttaaactgatggttctatctggtgtcatagaatacagtattgtgagtgtcaagtaggatagtcagcctaaaggaacattggcagatagactctgactctgcctgtttcacttcgtgggcagtggcaacttggaactgtcaagatgttctccaaggctgagtctgtcatagagaatgcaaggtctgctgtgggcatggagaggagcagtggtagcacaagtgccatagatttgccatctacttaataaaacataattttttattgtaacaattttgtgacagcaaaaattaaagtgragccaaattaaggtcccatcaaatgttggctgtctcattagcacaactgaatttcttatgactctctcattttgtataataaatcaactgatatcttttccattgtgagctgtcaggagacactcctaggcctagaattctgattttctgtttttccttcactaagtaaagagacgtgtgcagtatttagttcaggggatctttgtcaagattttggaatcatacctctagcagagacagaagcaaagagcaacttgatcatatgttgttttgatggaatgcccaccattctgcatcctgaagttcaatttctatggacttttattttacagaatccaaaaatacttgattatggcaactttgaaaccttgccatccaagctgatgaggtttctggtttagagcagatcttgacagaagatgttcatcctttactatttagtgcctctccagcatagtggccatgttttccaagccaaacagggtacttggtttgaattggatttttatgttatttctaggttcaagaggtcatctttgatgtggtttaaacataaaaatactgaggtttccatgttattttagtagtttatgggcacaaaggaaccaagtctgtgaaattagatctctgttggaaaataagggattaactytggaaaatacagaacttgtatttgtttctaggttaactttatgtttgtcagtattctgttgttccagggatggaatgggtatcttgcattgaagacctctaagcctctgcatggaagaattttcctcttcggaggaacacaagagtgctatagaaattctttggcagtaattatccatatatgctctcacacatttagactttcttcttcatttatttccatccttttcctcaatgacctattgacataaacatttcctgtcattattataatagtgataattattataattactatttgttcaggaaattttatgttattatgattagcacactttagtgttacagacattagtgatagctctttattcataattgaggatgaaagccacctcagagagctgttacgaggatcttactggtcaccacacactacttcttcatatcacttagtacaggtaaagttaaatcattacatgtgctattgcttgcttaatgtcttctccacagtggtatgcgtgctttcagktatggcatattatcacatgtgttttattcactgggatatctccaatgctgagcacagtaccttagacttaggaggctgaagaaacaacacacaaatggaatgcttgttaaagtgccaacagagtgctggcacttagtaccttcccagacagtggtttgtaagagaataattgctaacatttgatctagctctttacatatattatgtaatatcctcagttgtgcccataattaaaatatgagagttttgaaaccataaagttaatacatttaaagtttaaagccataaagttaatacatgcttattataaaaataaaaaagagtcaatgctgaatatgtaaaatgagaagcgaatgttactgtattaggtttgaatttccaacccctaattaagattccttaacttgtatccattgcagacaatttgtctcagggctatatagcaactagggagaacaaagatgaatttttttccttcttaattaattttctccctgttctctgtctgttttttgttggtttgctttttttttttttatcatgtaggatgaatagggttagggacggagcaggccagggaaggagaacagcctctcctctggctcttggctccttatgtggttgatgaagaaaggagccatttcatgagtggcaggacaggaaatcagaagcacatgaacaaagaagtctagaactggatgtttcttgaggggttcccagtgagagcagtcatatcccatttcctgtatttccccctttggtatggggagtgataccgagaagtctgggctcaggtccactggagggactcctgtctgtgtttcctatactccatgtccactgccttgacatgagcattattttttttaattctttatttatttttattgtatttttattatactttaagttctgggattcacatgcagaatgtgcaggtttgttacatatgtatacacgtgccatggtggtttgctgcacccatcaactcgtcatctacattaggtatttctcctaatgctatccctcccctggcccctggccccctgacaggccccggtgtgtgatgttcccctttctgtgtccatgtgttctcgttcaactcccacttatgagtgagaacatgcggtgtttggttttctgttcctgtgttagtttgctgagaatgatggtttccagcttcatccatgtccctgcaaaggaatgaactcatccttttttatggctgcatattccatggtgtattccatggtgtattccatggtgtatatgtgccacattttctttagtctatcattgatgggcatttgggttggttccaagtctttgctattgttaatagtgctgtaatatatatacgtatgcatgtgtctttatagtagaatgatttataatcctttgggtatatacccagtaatgggattgctgggtcaaatggtatttctggttctagatccttgaggaattgccacactgtcttccacaatggttgaactaatttacactcccgccaacagtataaaagtgctcctatttctccacatcctctccagcatctgttgtttccagacttttttttttttgagacggagtctcactctgtcgcccaggctggaatgcagtggtgcgatctcagctcactgcaaactccgcctcccaggttcatgcgattctcctgcctcagcctcctgagtagctgggaccacaggcgcccgccaccatgcctggctaattttttgtatttttagtagagatggggtttcactgtgttagccaggatggtctcaatctcctgaccttgtgatccacccgcctcagcctcccaaagtgctgagattacaggcgtgagccaccgcgcccggctgttccctgactttttaatgattgccattctaactggcgtgacatggtatctcattgtggttttgatttgcatttctctaatgaccaatgatggtgagctttttttcatatgttctttggctgcataaatgtcttcttttgagaaatgtctgttcataatctttgcccactttttggtggggttttttcttgtaaatttgtttaagttccttgtagattctggatattagccctttgtcagatggatagattgcaaaaattttctcccattctgtaggttgcgtgttcactctgatgctagtttcttttgctgtgcagaagttctttggtttaattagatcccatttatcaattttggcttttgttgccattgcttttgatgttttagtcctggagtctttgcccatgcctgtgtcctgagtggtattgcctaggttttcttctagggtttttatgattttaggtcttacatttaactctttaatccatcgtgaattaatttttgtataaggtgtaaggaaggggtccagtttcagttttctgcatatggctagccagttttcccagcaccatttattaaatagggaatcctttccccattgcttgttttagttaggtttgtcgaagattaggtggttgtagatgtgtagcattattcctgaggtctctgttatgttccgctggtctatatatctgttttggtaccagtaccctgctgtttttgttactgtagccttgtagtatagtttgaagtcaggtagtgtgatgcctccagctttgttctttttgcttaggattgtcttggctaaacaagctcttttttggttccatatgaaatttaaagtagttttttctaattctgtgaagaaagtcaatggtagcttgatggggatagcattgaatctataaattactttgggcagtatggccattttcatgatattgatgcttcctatccatgagcatagaatgtttttccatttgtttgtgtcctctcttatttccttgagcagtggtttgtagttctccttgaagaggtccttcacatcccttgtaacttgtattcctagatattttattttttttgtagcaattgtgagtgggagttcactcataatttggttctctgtgtttctattatttatgtataggaatgctcgtgattttgcacattaattttgtattctgagactgctgaagttgcttatcagtttaaggagatttttggctgagatgatagggttttctaaatatacaatcaggtcatctgcaaacagagacaatttgacttcctctcttcctgtttgaataccctttatttctttctcttgcctgattgccctggccagaacttccactatgatgttgaataggagtggtgagagagggcatccttgtcttgtaccagttttcaaagagaatgcttccagctttttcccattcagtatgatattggctgtgggtttgtcataaatagctcttattattttgagatacattccatcagtacttagtttattgagagtttttagcgtgaaggggtgttgaattttattgaaggccttttctgcatctattgagataatcatgtggtttttgtaattggttctgtttatgcgatggattaggtttattgatttgcatatgttgaaccagccttgcatcccagggatgaagctgacttgatcgtggtggataagctttttgatgtgctcctggattcggcattgccagatcgatgttcatcagggacattggtctgaaattttctttttttgtggtgtctctgccaggttttggtatcaggatgatgctggcttcataaaatgagttagggaggagtccctctttttctgttgtttggaatagtttcagaaggaatggtaccagctcatctttttacctctggtagaatttggctgtgaatttgtctggtcctgggcttttttttggttggtaggcattagttaacttgttattggtctgttcagggatttgactacttcctgatttagtcttgagagggtgtatgtgtccaggaatttatgcatttcttctagattttctagtttatttgcgtagaggtgtttatagtattctcttattgtagtttgtatttctgtgggatgagtggtgatatcccctttgtcttttttttttttgagatggaatctcgctctgtygcccaggctggagtgcagtggtgcgatctcggctcactgcaagctccgcctcctgggttcatgtcattctgtctcagcctccggagtagttgggactacaggcgcctgccaccacgcctggctaattttttgtatttttagtagagacagggtttcaccgtgttagccagtgtggtctcgatctcctgacctcatgatcctcccaccttggcctcccaaagtgctgggattacaggtgtgagccaccgcacccagccacctttgtcattttttattgtgtctatttgattcttctctcttttctttttttattagcctggctagcagtctatctattttgttaatcttttcaaaaaaccagcttctggattcattgattttttgaagagtttttcatgtctctatgtccttcagttctgctctgatcttaggtgtttcttgtcttctgctagcttttgaatttgtttgctcttgcttctctagttcttttcattgtgatgttagggtgtcagttttagatctttcccaccttttcctgtgggcatttagtactataaatttccctctgaacactgctttagctgtgtcccagagattttggtatgttgtgtctttattcccattggtttcaaagaacttatttaattctgccttaatttcattatttacccagtagttattcaggagcaggttgttcagtttccatgtagttgtgtggttttgagtgagtttcttaatcctgagttctaatttgattgcactgtggttggtctgagagactgttatgatttccgttcttatgcatttgctgaggagtgttttacttccaattgtgtggtcagttttagaatatgtgtggtgctgagaagaatgtatattctgttgatttggggtggagagtcctgtagatgtctattaggtctgcttggtccagagctgagttgaagtccgtcctggatatctttgttaattttctgtctcattgatctgtctaatattgacagtggggtgttaaagtctcccgctattattgtgtgggagtctaagtctgtttgtaggtgtctaagaacttgttttgtgaatctgggtactactttattgggtgcatatatatttaggatagttagctcttcttgttgcattgatccctttaccattatgtaatgcccttctttgtctcttttgatctttgttggtttaaagtatgttttatcagagactaggattgcaacactgcttttttttgctttccatttgcttggtaaatattcctccatccctttattttgagcctatgtatgtctttgcacatgagatgggtctcctgaatacagcacactgatgggtcttaactctatccaatttgcaagtctgtgtcttttaattgggagcatttagcccatttacatttaaggttaatatttgttatgtgtgaatttgatcctgtcattatgatgctagctggttattttgcccattagttgatgcagtttcttcatagtgtcagtggtctttataatttggtatgtttctgcagtggctggttttggtttttctttcttatgtttagtgcttccttcaggagctcttgtaaggcaggcctggtggtgacaaaatctttccgcatttgcttgtctgtaaaggattttatttctcctttgcttaggaagcttactttggctggatatgaaattctggcttgaaaattctcttaagaatgttgaatgttggcccccagtctcctctggcttgtagggtttctgcagagagatcccctgttagtctgatgggcttccctttgtgggtagcttgacctttctctctggctgcccttaacatttttttccttcatttcagcctcggtgaatctgacaattatgtgtcttggggttgctcttctcgagatgtatctttgtggtggtctctgtattttctgaatttgaatgttggcctgtcttgctaggctggggatgttcatctggataatatcctgaagagtgttttccaagttggcttcattatccccgtcactttcaggtacaccaattaaacataggtttggtcttttcacatagtctcatatttcttggaggctttgttcattccttttcattctttttttctctaatcttgtcttcatgctttatttcattaagttgatcttcaatctctgatatcctttcttccacttgattgatgtggctattgatgcttgtgtatgcttcatgaagtgctcgtgttgtgtttttcagctccatcaggtcatttacattcttttctaaactggttattctaggtagcaattcctctacgcttttttcaaggttcttagcttccttgcattgggttaaaacatgcttctttagcttggagaagtttgttattacccaccttctgaagcctacttctgtcaatttgtcaaactcattctccgtccagttttgttcccttgctggcgaggtgttgtgatcctttggaggagaagaggcattctggtttttggattttcagcctttttkgtgctgatttttcttcatctttgtggatttatctacctttggttttcgatgttggtgaccttcggatggggtttttgagtggacgtcctttttgttgatgttgatgccattcctttctgtttgttagttttccttctaacagtcaggcccctctgctgcaggtctgctggagtttgctggaggtcctctccagaccctgtttgcctagttatcactagtggaggctgcagaacagcaaagattgctacctgttccttcctctggaagcttcgtcccagagggtcacccgccagatgccagctggagttctcctgtatgaggtgtctgtggacccctgctgggaggtgtctccctgtcaggaggcacaggggtcagggacccacttgaggaggcagtctgtcccttggcagaactcgagcgctgtgctgggagatccgctgctctcttgagagctggcaggcaggaaggtttaagtctgctgaggctgtgcccatagctgcccctttccccaggtgctctttcccagggagatgggagttttatctctaagcccctgactggggctgctgcctttctttcagagatgcccagcccagagaggaggaatctagagagacagtctggctacagcagatttgctgagctgcggagggctctgtccagttcgaacttccaggtgactttgtttatactgtgaggggaaaactgcctactcaagcctcagtaatggtggatgcccctccccgcaccaagctcgagtgtcccaggtcgacttcagactgttgtgctggctgcgagaatttcaagccagtggatcttagcttgctggcctccatgggggtgggatctgctgagctagatcacttggttccctggcttcagccctgcttttaggggagtgaacggttctgtctcactggccttccaggcgccactggggtattaaaaaaaaaacagctcttgcagctagctcagtgtctgcccaaatggccggccagttttgtgctggaaacccagggccttggtggtgtaggcacctgagggaatctcctggtctgcgggttgtggaccatgagaaatgtgtagtatctgggctggaatgcactgttcctcacggcacagtccctcacagtttcccttggctaggggagcgagttccccgactcctcgagcttcccagtgaggcaatgccccaccctgctttggcttgccgttggtaggctgcacccactgtctaaccagtcccaatgagatgaaccgggtgcctcaatgggaaatgcagaaatcacccaccttctgcattgatcttgctgggtgctgcagactggagtagttcctattttgctatcttgccagccacctctagttattctatgaggcttatttagtatcctaaataaattttctttgtgcattctctcagccttatgcattctctcaacttatgcataacattttagttacctgccatcagcgtaggcagtttacagaggtgaacctattctctctgtctcataaataatataaataatttcatgcttaaacaatatttctgcagcatttctgaaccagagatttctgatttttttaaggggctgcatagttttctatagtgtgaataggttcacagttccttattcacaacgtaaacttcaaaagctctggaaactgaatgttttcttacaactcacttggttcacaacctaacttttgatgaactcatttggtattgaaccctacttgaaccacctcgaggctatttacttttaactcacttgtgttaatatttgtatgttgtgtagaaaaaacagtaatgtatttgattataggtgctgcccccagccccactgggggaggttctgtcaaatatggcagatgtacattacttttcttaaagttttgcattccaaaatacacatggtctccagggtttgagataagggattggaagcctattttggacatatgggaaaggataaatttttaatttaaggtcaaaatcatactttgtaaaagtcatattaaataaaatgatactatgttaacataggtaatataggaattagatccagctatagatacggatatgattttgtgcaaaactggttatttatgacttcagataaatgggacggcccttattcaacaagagctagttttgttgtctctgtatgtttaatttgtcaaagctaaattttcaaggctgaatattcattggtatagttctgttagtctgggttctcagagaagcagatgccaagataggattgaatgtgcaaggattttatttggggaaatgcctgtgtgagagaaaataggagcaagatgggggaaggctgggagagctttcagactgcaacaccaatctgaccccaagtgatgacagaggcagagaaggctggctggaagtgtcctagactgttgaaaagtctgagaaaggctattagaggcctgcatctctcaggaacaggcctgccttagtatgcttactatactcagtgcttccagtcactggctgggaacaacctgtaggaagtgtagcctcagagcaaatgtggagaagattccagagtttagcagcaggggccccagctcagtaatgctccctgtagttggaagtctgcaaggtgcatttccaaggccactaacgtggtagatggatttccatggtttttctgattatagatgtgtacaagatggttatatatatttgcttattatagagacctctttcctggtgtacagaatattcaggagttcaaatggacccctaatgcatgggggcatttcggtcaggattagcttgacagaggagcttatagtagcagtcatgatgattatgctgtagtcacaaacagcactgaaatctcaggggctgaaataacagatgtttgtctcttgttcacactgcatctttgcattgcatcatcactgcatctttgcattgtatcatcactgcatcttgattgtgggttgagcaatttgtagctagcttttctccatgttatcctcactcagggatccaagttgatagagcctccactattcggaactgatatcactggtctcaaggtgatgtcagggagaagagaaccttgtgaatggcccactggctcttgaagcttttatctggaagtaacacatatcatttctattgacatttcattgtctaaagcaaagcaagtcactaggccacatctgacctcagggcgaagtgcagttctgccattttttcagaagcagagaagtctagaatatgattatcagccctaatgtttgtcatatgttatgtatttagtcagggccccagaaggaatagatggcattcagactgggtagtgaggggagcttagtaagtggactagttacaacagtgtgttgtttcagtgatctagcactgtataataaactattctcaaacttagtgacttaaaacagccattggttattagtataaatcatgattctctggttcaggaatgcagtcagaacatggtggggacagctcatcactgctctgcgatgtctggggcctcagcaggctggggcctgaacaggttggggctgattagatctctctctctctccttctttccctccttccacacagcctctccacagggctgcttgggcatcttcacagcatggcagcctccggtaattggattcctgtactgattgaactccaaggactccgagagtgagtgtgccaaagaggcaaaagatagaagctgctagtctcctaaggctggggaacctggaagagtatcccttatgccatatttcattgttcatagtcacacagagaccactcaatttcaagggaagaggacaaagaccccacctctttatagtagcagtattaaagaatttgtggccatattctgggcaggtttaccacagttgccacccctaagtctgaatgtgctgtaaagggtcaaagagacatatgtggagaggcccacctgataagagccatgaacttcagtcatgggttacaacctgcctgaggcaacccttcagaggggagtcaggggaataaataactaagtttccttcttcttccttccagtctcctgctggaaccccattgggtgaacccaagtggaaagcatatggaagggaaccatgggaaaaaggtccatacaggtctactgggggggcatagggcaaggtggaaaaggtggagagtagatttagaggggccgttggaagccatcagcatgcttatttaccagtatcagcatcttagagcaataattggaaggtagatatggttcctgtagagtgtgtttgggtttaatgcataagtaaattgcagcttaaaattttctagaaacacattagtgaatctactttttatagcttatagttactgcctcattctgtttattgatccttgtcctctggaacctaaaatcagagttggactccaatgtgacgggtagaaatgctaacaacatactagatatgaataaatgaaggaatatctgaagcataggtagccatcaccaaatcaggcttattattacatgaatttatacagagtcagggtgtgcagtggaagagcattagactgtgagtaagagatctgggttctagtcctggctcttttgtttactactgctgtgtgaacttgtgcaaagcttccaacctccttgagtcacattttatattagtccattttcacgctgctgataaagacatacctgagactgggaagaaaaagaagtttaatggactcacagttttacatgggtggggaggcctcacaatcatggtggaaggcaagcaggagcaagttacatcttacatggatggcggcaggcatagagagagagcttgtgcagggaaactcctatttataaaaccatcagatctcatgagacttattcaatgtcaccagaacagcatgggaaagacccgcccccatgattcatttacctcccactgtgtccttcccacgacatgtgggaattgtgggagctacaattcaagatgagatttgggcaaatcatatcacatttccatagctgtacaatgaggatagtagacctcctctttcctccttacagggtatgaaaatcaaatataagtgtgttctgaaaaatcatatactgttatatgcaaaggtattatcataactattgcaggacagattctgccatctcatatgcagtaaaaggataatattgtttgttcaaagaccatttagtcagtgtgcaccaggtgcaaagtactgccagactccatggggaaatgaaggtggctgaaaaactctgtcatctccatggagtttataatctgggacccaggagactgacatgttaatttaagcaagaaaaactaagtgctgtgacagagaaagtagccagggcaggtggggagggagagagtgacattgtgccgaaccttgaaggtgagcaggtagggagggcgtggaggagtgtgtttggatgaaagtacgccaggagagctgtgatgtccaaaagaggtgagggaccacgaggactgagaaaagaccctaatgtgatttgtaaggcaggtgaacattgatatccatagtaagcagtgcagagggagtcagataaggggctcaggaaccatctggtggtgacaaaataatgccgcttagtgtggactggcattctgggtagtgtggtgatgaacagaagaaaacaggcaggggattcaagagaagggaaaggtgtggagaaaaagacagacacaagtgattcaagatttaagagataagggattgtcctgctytctagctataaaacctttctacactacctaaaagagatgactgcttctcccttaaggactatacccagctttttcctcaccaggctaataaatgcacttagcatttgcttaaaaatattgggattgtggccagtcgcggtggctcacgcctgtaatcccagcactttgggaggccaaggtgggtggatcacgaggtcgggagttagagaccagcctggccaatatggtgaaaccttgtttctactaaaaaatacaaaaaactagccaggtgtggtggcatgtgcctgtagtcccagctactcaggaggctgaggcaggagaattgtttgaacctgggaggtggaggttgcggtgagccraaatcgcaccactgcactccagcctgggcaacagagcgagactccgtctgaaaaaaaaaaaaagagagattgtaaagaatcrctttattaacaacccctggggcttctgactccctggacccgggtttcctcttttccccctttgatgccacactctgaactctcttagttctccttagggtctgtctgctctgctgactggatgttgtctttccctaaatgtgggcatgcctcagggactattcctgcactgattgaccctcatgattgctatccttgctctgcacagatggcctaaaaagctctggggctgagtatttgaccactggctagatctcttcatctcaatgacctgttgcttcctcaaacttaaaatgtcaggaggcaaactcataatgtctttctcccgaggctagcttaattcatcctctgcataccttctttttgtgaataatatcacttttcccacttacctggcatagaactcttaatcatccttgaattttttctcttaatcttcccaaatatagtgccaaccttttcctgcaaggttcttgagtctgtttttttgtttcttctcccaatagtgtcactctgggtcttcatctccacatatcttgaccagggttagttttcacttatggtctcattactgcaacttctttcttcagattatctcacacaaaactgctggattaaattttctaaacacatcatccttcctctgaaaccttaagtggctccacttcctacaatgttcttggtctacatgctgtgtcacagccctgactccgtaccattctcattcttggttcaaggcctctctcctatactcagtccgttttctctgcttggaacattctcttccttcctcctctgtggtcaagasttactctttcttcaargaccagcctaaatcccacagcctcctgcagctgtcccttacattggaggttctagtcttctctgttccctagagttggcagctctcggtgcccatgttattctgagcacgtgctcctttctattgttaggtgattttgcatttgaccctgcttccctrctctttcctgaaacccctggaagggcctgcatctgtggttcccaaacagtgcaccaaggagccctggggcttttcaattaattcacaggggtactaggagatattttcagtttgtgagggaaacacagtgacatctgttggacaccacatgaactaacagctcaaaataatttgcagttttggyatgaaatcatattcattactttcaatttggtcttaccaatttaaaaatgaatttttgggccgggcatggtggctcacgcctgtaatcccagcacttcgggagactgaggagggcacatcacctgaggtcagaagtttgagaccagcttggccaacacagtgaaaccttgtctctactaaagatacaaaaattagctgggcatggtggtgggcgcctgtagacccagctactcaggaggctgcagcaggagaattgcttgaacccaggaggcagaggttgcagtgagctgagatcgcgccactgtactccagcctgggtgacagagtgagactccatctcaaaaaaaaaaaatactaataataataataaataaataaaaatgagtttttgttgggttctgtgtttaagaacaagtatcatacaaaaattgatgtgaaacaggaaatgaggtttgtagcagacaaaaacaagtgaagcagtctaattggttttgtcattagcttgggaaaatctccatccagatatgttgtttcaggatcctgggctggtgggagacccgtagagagttggcagttgcagccaaagatggcttcagtgcttgtcctggatctggcaggattagaaagaggggactgttaggttgtttggatgggaaaaggttgtataagtagcacctcaggctcagtcatattatttctgtcaaatgtcttgtgaactagggtagggtagtcttttgtttagtgggttgttttgctcctttttaaaaagagattgttaccaaattatggcaaaagtttgggactatctctggtggatagaggtagagacatcgaggtgaatgtgctgaagtaagaggtagatggaagggaagataattacataccatcccttctgcaggcagctcacaggcattcgcaatgataactgtgaccacaaagaaagcctgcacctttggtttatgcaaagagcagccagctgtgtttcattcaacaaattattccattcaagagcacttggaaagacagaagcaaaaagtctaccagaaaaactgatttttccaccatctcttctgtgctgaaaccatgcttgaacaacatacatgggtagaataatttcagccatttccttaaaggcatgtgtgctgggttcatataagccgccgtggagcccatttgttttacaagcttgtcttccaaacatgcacatacgtattcatgatctgcatcctgcaagctcaataattcatggcttattgacttaggttgatggatggaagttttttggggactagagaagtaaagatggaaattttgagaggctgagagcagccacacttgtgagttgcccacttgctgtaagtgtgtatgtgggcgggcaggctggaactccggtagagcccagtttggctcttactggctaggcatattttggacttttatgcccagtgaaaatagtgactgaagattttaagagcaattaagtaccatcttcaaattattatcaccattataaaatattaacgggctataattgggtgctgagtttgcaggaggaatacactgatcgcttatgtcatagtgaggagtgggcaggacagcatgctgttcaaccatgatttaatttcatttctcctgtccgttcttcctcatgcctctctagtctgggagatagtagcgggggttctggagtaggagaagggtagacacaagtcctcttacttgttctctggcagacttcccgttggatttttggatgcttcagcaggtctctgctctttgtcacttgtcatctgtgccacttcctgaggaaaaacgtcttgaagttttatgcctggtttcctataatgctgtggaatttcactgatcatgtcattcctttcagtggaaaatgggaagaaggaatcaaaagcatggaatgtaagatgccaccttggctttggaatttttagattttgttttttaaatttggtggttctttgctaaatcttttgtagcttcccttgacttagttgagccccaaacgaggcaccatctctggggtgaaccaaactaaaagatacagaggaatactttttttgatatctgcatttcatatttctacttatatatttcaataatttgcagaaaaccccacaaaacattgtcaaccttattgacccatggtttttaatcactgaaggctcctgaacattgtcttgttctatttttgctagctgctttttcctcttcttgtaataatcttgagctgtatttgttcatgtggaactttgcctgtttcttaccatgcttggagtaaaccagtgacttagattgtattctccactgcgctgaaagcatacctatgtgcccacctcagcccacagactgctggtctggtaagaagttagggggattccaacaatgtcctgcagaaatgaggtggttcttcttagaaggtgctgctgttgtctccacagctttacaggcaggcgctggttccgggacagacaggtattccatttagagccacccagcagttggggaagttggggattcttaaacttggcaggaaagctcaatgcccctggtrccatctcacacttacacccttatcagatgctgtccgagatccagttgtaaccaagggagccataattaaggagcctggctcagctgggataggagtggtggagcccaagcaatcattctgtctactcagttcccctggacttaaacagaagagtaccgtggaagcagagggccagatgtaaccatcactataatcagtcagtaaacacaattgaacgaggtaattaaaaggcccagtcctgttgtggrmctgcaactaggtaacatggagtgacggtagcactrttaaatctggattgaaaaaatcatattaagcaggccagttttagacagactaaattaataatttctctatccagtgacagccagctattaagtagatctagaaaattttagtgacaagtgtaagaggctttgacttgggaattcttgattaattgaaaactaaaagtgtgtaccatctaatatattcaattaatgcattatattcaactgatacaattttgggaagctgcctagcttgacagttcaagaaatgggttttgagttagcaagaccttggtttgagtctagttctttgctactttatgtgcctgtggcaggtattctcattggtgtatatgtataatctagggataataatacctaccttatcgggcttttgtaaagactaagtaagattatgcatttaaagtgcttatcattgtctctggcacttagtgctaaatacatactacctattattacttatttaagtaaccagctgaatctctaaagtgagacatccttcacatgacactgtgtgttactagccaataaattttataccatttttggtcactatagtgttttgattttagataatatgcttgttgctccttaacatacttttacattatttcacagccagcatcacttttgattttctttttcttttttcttttctttttctttcttcttctttttttttttttttttttttttttgagatggcgtctmactctgttccccaggctgaagtgcaggggcatgatctcggttcactgcaacctctgcctcccagattcaagcgattctcctgcctcagcctcccaagtagctgggattacaagcgtatgccacaatgcccagtaaatttttgtatctttagtgaagacagagtttcaccatgttggccaggctggtctcaaactcctgacctcaagtgatccacccacctcagcctcccaaagtgctgggattgcaggcatgaggcaccacgtccgacccctaacttttgattttctcttatttctctcagaatgtggtatcaactcagttgcttatataattgttttcctatttattctaattctcagtgtcacatgttctcaaacttgaatgtgcagctagttactggggaacttcttcattgcaaactcctgggttcyggagattctgctttaataggtagggttgaggcccaggaatttgcacatgagccggcacccaggtgctccagtgaccacacttggaggagcactgatctatgcccttgtgccggcacttctgctattaatgctccttcgctgaactaggattcagaagacaggggttctagttatgtgtgctgtcaagggtcttaacccagttaaggattcagttttgtcttctatggtaatccccaccttgtcagcctcccaagactgtggtggacatcagatgatgtcagataaaagcactttggtgaagccttttccaaatgagcaaggtattaaactggagataaggaatctcaaaatatttcatataacttaagacttagtagtagtatctaaaggcgagtagtgaaaggagattgttgggttcttaaatattaggggttccaagaatgtgtttcggcctctaatgtgtgagtagtgtttgattgagcggggtacctcccattgttcaggatgctggccaagtgtcattatttattactatgaaatcaaccctgctctcctgtgtggtgctattaagatatgtggacagtgatttcgataccataaaacttttttcgaatggaaatgttatcagcttgggattgcaatactggccactcagtgatgtcatgtatatcacagaatactataagataccactgttctacctctgacccagtcctgccaaatgccttggtgctatgggcaggagggaaaagagtgctccttataatttgaagttacataataaagatgtgatgggaagattttcttcagctgagtataaccattattactttttttcacttcccattttctaggttattaagtggaaagatgatgtacccagacatttagatctatatacaaatatgctttctcttcatccacatgtagaaaaacctacaagaatccattatttatcccagagctatactgtggaccaactgtagaacataaagaaatgacaaatgtttatggtggaaagcctctgagaatgtggaaatataatagaagcaattggaacatttgcttctttttttttaaagaatatctgtaattactatctgaagtcttgtgctgagtttccagtgtagttaagcactgtgtctttgaatgttttgtagacaaggaggctccctgtaaggcacgtggcatgtgttcagctgatacctgggcatattgttatgtgactggaagaccagatctttcctctcattttgcataatcacacaacaagtagtgaactaattggccgtaggatctatatcaccttggcctacagccaacttcatagtatcttgaggcaccccatcactttaatgctgtatctaatgctgtgccaaaaaaaaacaaaaaaccccaaaaaactaaaataaataaaaatgctgtcttaagtaagtaaacttaaaatagagagcaaagaggaaggcacatttattcattgacatgaacctagatgtagtggtatctagtgagtaagttttttgtgaaggatttaatatgatgtggattttagagtcagactaccaggattggtttcccagctctgccacttgctagctctgtgcctttggtagagcacttaatctttctgagccatgttcttcatttgtaaaataggggcaataataataatgctttaccttataggactggtgaagagtaaatgagttgatactttaaaatggtgcctggaacaatgtgtatgagttaactcttattactgtttttgtttttattgttacatacttgttgggaaaataatagatttagatgactaaacagctcttttgttcccactccatgccaccccataatgccaccatctagtggatctaagaagaggctctgtgtatatcatctttccactgtaatttatcaaatttggcatattgccaggaggaaacaggtagagaattgtagaaatcaggtttattaggagaaataactcagaggtgtagacttggtagaacccaaccatttgaatcttttcctaggctaatcccaaagctccttctacctccttctctgtagactcacttctccagctattctgggccatttgctataccctgagtgtgattccagccttctagttaaatgcccrtgcttatgcctttcytccacttgagatgccaactatatttagcatctattccaactacatttatccaaatcttctcatcctccaatgtccagactgcatgccacctcccagattcttcctgatcagtgcaggcatagacaataactcttcacttctctagagtttgctggcatcacccaagtgggacttgaagattacctggtatgatcattatagatttgttatgttgtacctctcataccaggtggtaaacaccatgagagtagggaaccatacacatttctttattcatttgttcattgaacaaatgttataatatatagcagaatttatagtacattgccaagtatgtaataggtattatgacatctcttgaataaatgaacatgtgaatgtagatatggtaactaggtaggagcctgtgtgtgtgtatgtatgtgtgtgtgtgtgtatgtagctatgagagagaaaactaatgagaactgtagtggtcaggttaggttgatgaactgatgtttagctagcattgtgaggtggcatggagtgggagaaaaatgaggcacttgcacaggggtgggtggtggtgtttaggattggctagagatggctgttgcttggtacccagtaggtgctctatgttagtaactcttaaatgtcgtggaagtccaaaagagaaccagagttgagacagatactgctggagaaatttaaaggaagatatagatattttatgaaaaatgaaccaaaaaatatttctgaagaatgaatgatggctccaagaatgatgtttgaaatgtgctctctatatgtagaaatgaaattgtataagggcgtcaaacttttctgtactgtttttcatttgagttgcttatgagatatcgaggtaaaataattggcaatatatcattgctatggttatttatcaagacatcaaactttctgactaagcatgtgtaatatttatatttatgttaaatgctttaatacaactagtagattttaaccatctagtttttttctttgaagatagcattctgtttgtctgaaattagaatccatttcagtttcatggaggagcaaaggtgaggcactcatctgtctctatgtcctttttgcctgacacagtgttagcccaatgcttggcaccagtaggtgttctatgtataagtgtttttcagtaaatgaattaataatatatcagtttttctctaaatgaattaataacatctcagttttaaaaacttcacagattagatggattgatttcatgaaacatttcctttgtgtttaagattcttgccaaatctaagtggagagattaaattggagatagaaaaatgattatgtacatttgtagaactttagtactagacataattccagagattatctagttccarttcctcatttttcagacaaaggcattgaggaccagagaggttaagtgacttgcttatgctcacatcatgtcaagcttggacctaacccagatctccagatctccaggcttcagtatcatctctttccattaggcaccttggaagtaaatcttagtttcattattcctttcatggcctaggtttaactcctgagctcccaaagaagaatttaggaaaatttttattgtgtttttgttaattgcaaagtagaaagatttctgagacagcaactccccttcctctcaaggatcctgtgcaatgcatgggctgcttgggggtacccatatgtttttgtttttgtttttgttttgagatggagtctcgctccgttgctcaggctggattgcagtggcacaatctctgctcactgcaacctccgccttccggcttcatgcaattctcctgcctcagcctcccaagtagctgagattacaagtgtgcaccactacgcctggctaactttttgtgtttttagtagaaatgaggtttcaccttgttgaccaggctggtctcaaactcctcacctcaaatgatatgcccatctcggcctcccaaagtgttgggattacaggcgtgagccaccgcactcagtctcccatattaatttttaaatgtcctttcctcctgttaagtctgctggaaaaagagagcttgtgccatctagtggatctaagaagaggctctcaggcttaaattttgggtggccttactttaaaaagaagaaaggaacaatatttttatttaatgaatctgcacattctcacatggaatcctttttatcatgagagtggcagtagcagcacagaatgaagttagggtcactttgtatttcatagtgctagagacgcgacaccttactgaccgtgcttctttttagtggtggaaggcaggtcacaaagtgggtaactggatttaactgatttaactggatcaggaaaggcatgagcatgggtatttttaggtaactctccaggtgattctaacatagaaccagggctgagaaccactgctgtattacaatcttggtttttcaaccagtgcttggattcttgtactcgttaatttaaaacactggctcttctgtaatgggtctttccatcctagttgggaattagtcaaatcctattattcctgggaaacccgctagtgctcatttggacaattaacttattcaagaatgtacagcattctactatccaatggataatgaagttttagaagctttcaaattactcctttgttttccttcaatggagattttaaatctttttacatgctctggaaaatatttatctcatgtggcaggtggtagaagacaatatctgtcaagcgggataacttgatgactgaatgggcagtgcaggccgagggctgtcatcactgacattgccctgtgatctgaaatgcccgttaacctcctgggcttgaattttctttgaagagtgtgattggtcatctttatatttacagagtactgctcagcaaaaaactaggttacaaaaaaaagcttttgttactccatcagtgaaatatcttaagtggcaccttagcacctgtgtagtgtagttgtacttgatggtcataatgaccaggaggctttgtgatggtggtccacagcctggtgcacatcagaagcaacaagggatgcctggcactagacctggagataattatttaactggatcaggatagggcatgagcatgggtatttttaactaactccccaggtgattctaacatggaacttgggttgagaaccactgccacaagatattcttaaaaatgttttgcaggctggatgcggtggctcatgcttgtaatcccagcactttgggaggctgaggtgggtggatcacctgaggtcaggagtttgagaccagcctggctaatatggtgaaaccctgtccctactaaaaatacaaaacttagctgggtgtggtggcgcacgcctgtagtctgagctactcgggaggatgaggcacgagaatcacttgaacgtaggaggtggaggttgccgtgagctgagattgtgccattgcactctagcctgggtgacagagcaagactccatctcaaaaaaaaaaaaaaagttttataaggccaggcatgctggctcatgcctctaatcccagcactttgggaggccgaggcaggaggattgcttgagccaaggagtttaagaccatcctgggcaacatgatgaaaccctgtctctacaaaagatacaaaaatcacccaggtgtggtggcatgcacctgtagtcccagctactcgggaggctgacgtgagagatttgcttgaccctgggacctcgaggctacagtaagcggtgatcacgccactgtactccagtctgagccacggtgtgagactctgtctcaaaaaaaaaaaaaaaaaagttttgtgaaccttgaatttcaaatcaagtttggcagtctggtgtatattttctggcttttaaattatttgaatattggagatccatatttgataaccagtattctcctggggcccagggagcaggaattgcactgttttgtgattagagtaatgaagttattattgtgtctaaatgactccatttttacatctctcagaggtgctggtggagtcagtccctgtatatgacccaggtttgaggaatgtgagtactttcagggattgccaggagcggtaagggccagaagttaatgcttctctgagtggcagcttaatgtattgtcataattgtacgcatctgagagcattgattctatattgttggcccttgtcccagtgacagtaggaaagtgggagtctttcacataaagcttttttccccctcttatcattttaataatgaatttcacctctttctgtggtttccaggagtagggtgctctgtgagttctctgcagaagctgttttctgcagtaaagtcctgatctgtcactgggaacagctttcttctgacaaatgtagctgaattggttggcagaaggatggcagggaggtaaaagggcagggagtggttataaatcctctaaaacgccatcaattgaactcttacaatgggagacagtgtctttgacgacgtgttccaaatggttgatacagatattcaatttcaaaggatttctgctgtgttttcagagggcaggggacaaaaatgccaggaaattgttagaattcttgtaaaaaccatgaaatttattatcaggtagacttaggtttgtgtctggcttctgccacttactgtgtgcttctagggcaaaagtttgagcctcacttttcttagctgtaagatgagaatcctaatacctacctaccattttactctatcaaggtgaattaatttgtataatacatgtaaaacatctaatacaatatttggcacagagctggtacttcataaatggtagctatttctggaactactattaatagtggtagtaattgatgataatggcctgtatgtccacttagcctttggtggggatggcaagggggtgttgacagaggctcatctgggaagggtatactcagaattttcatcctcacatagtcaacctgttataatttagagtctcatcacatattaatcctttaaaatgcagtcactctctagaatagttcatttcactgattactcattttgtgtacatcctgctgtttaactcagagggcttacaatacagattttttatgtaaacagtgtggacagggggttagtagaggagaggggaaaatataatttggggattactttggccataagtcacacctggtgtcatggtttggtgtggagtttggacacccagaaaaggaaagtttagattattgggaagttgggaagaggagatgccagaatgggtgacaggagggtggtagggacccaactacaatttagaatttcctgtgcagggttctctgttargattgcccgtgtgttgccatgagtttgtcttggtgtcccttctgtcatttgccatcagttggcagtgtctagaatacagttccatttcattgaagcactcagtctagagtataaagcatttatgtgaatcagtggaaactgaatttgtacggctgaggatctgtactgcagtttcagaaaagtcagtatagtttaattgaggtataaagggytctcctccccatctgagttgtgacaagttgagaaatacaaaaaatgaggcagatggaagatcaaaacaccatctttattaccagtaaaactgttgccagagaatagggtttactcctgtgggcaaacattcccaatatttaaccctagaattagacagacactcacccagacacattatagaacctgtggtggggaagagcagagacaaatatatctttctttctttcttttttttttttttttttttttgagacggagtctcactctgtcacccaggctggagtgcagtggtgcgatctcggctcactgcaagctccgcctcccgggttcacgccattctcctgcctcaaccttccgagtacctggaactacaggtgcccgccaccacacctggctaattttttttgtatttttagtggaggcggggtttcaccgtgttagccaggatggtctcaatctcctgacctcatgatccacccacctcagcctcccaaagtgctgggattacaggcatgagccaccacgcctggccagtactttctttttttgagacagagtctcactctgttgcccaggctggagtgcagtggcacaatattggctcactgcaacctccatctcctgggttccagtgatcattctgcttcagcctccctagtagctggaactatagacacgggccaccacacccagctaatttttgtatttttagtagggatggagtttcaccatgtaggccaggctagccttgaactcctgacctcaagtactctgcccgcctcagcctcccaaagtgctgtgattacaggtgtaagcctctgtgccctcccctgaatatgtactttctgctagaagcctggctcccaggagaagagaggaagggacaggctcaatcccaagctcaacaaaatgacaagttactcctcctttcctggagaagaattatatggggagtcagagagaggccagaagtacgctgctaggagattctgcatgtgggaggacacatgaggattggagacttcattttactgtatcatgtctgcataaattcaaactaagttctagcgaatttggaagtagtaattcatacttaaaaaaaaaaacaaattggagtggtttaaatgtcactccgatcactaagaacctatcatggtccctgtgacctgcagaagataatccagagtccttaacctggttttgaaaacctctcctgatgtggccccatcctgcctatgagccttccttcccttcatgatgttcaaatgcagatgtaaagtctgatcagtgccctcatcatcctctgaacagttcattcttgctcccgtgttcctgctggattatcctttccattccttgcctgttcatccaaagtgtactcatctgggccaggcgcggtggctcatgcctgtaatcccagcactttgggaggctgaggtggggggatcacttgaggtcaggagttcaagaccagcctggctgacatggtgaaaccccatctctactaaaaatacaaaaattagccaggcatggtggcgtgtgcctgtaatcccagctactcaggaggctgaggcacaagaatcacttgaaaccgggaggtggaggttgcagtgagctgagattgcgccactgcactccagcctgggtgacagagagagactctgtcttaaaaaaaagaaaaagtgtattcatctgttaggtctcaatacaagcactgctgtgggcagaagccttgcactgaagcatatgctgacttctcttatctccaaactgccaatgaactttcacataggactgcactgcttagtacttgttcatcaaatgagctttatctgccaattgctggaagttttttgagggataaatgcttcttatacttcttttgtgtatcctcagctgctagtatattgtacagctggaaaacactcaatatatatgcagttggttaaatagatgtgtcaaaagaaagtggctagcactcatcactatattagaatagagtgatgtgttggttatgctggaaaataaaataccagggcaaagaattgagattagcacttagttttatgtcactgacatggaatcaaagaatgctttgggacagacttttgtaacagagagggtagatcatctagttcatcatcattttacagcagagaaaacaaaggctcatgatttggaaagaaatgttcagagtctgtgagcttaatatttgtgagaggaatagaggatatgaagcagatgatctttcagttctttaatatttgattatgtttacaaggtttgtgtggtagctttatgtttgcattagagggtcctctaagtgttccaaagtgcttttctattatcctgtagatcctcacttctttatgtgctcgccaaaatctgtggaggaaggcacttttcacagaagccttcacatctcatcgtttaccttcttcattgacacatgtcaactcactgcggtagattacatagtatgcaggcctgagacatcaggcttgttttccgtttgtagcagttgggacaccagaatattacttcacttgcccatggtcaccagatgctaagaattaaaatgcaagtgtcttatattcattcccattgcagaccattttctactactccatgatgtttttctcttctttaaattatcatctggagaccctgagagaatcctggctgagaaagggagcacatttgtgattccctgatcagcaaagagatcggttaatgcaagtaccttaagcacccagggtagaaggttatgaaccccagattggagaaaggatggcctggctttgatgagtgctgagagaggatgctgccctgtgccagagtggaacaggaagcgggagctgatacctgagaaggacaggtcagctagccagctctcagggaggggtttccaggacagccttattacttgctttatgttgtagacttctcaagacatccatgatcatatttaactattgtacaaaaatagcaaacaaaatataagtagtgttttggtcatttgtgccactgtttttttccagtaaattaaaacaatttttggtttttaacttaaaaaattaaatgttagtgttgtctcttattggttagttaacagaaaagctaatagagaagttagtctgtctagtgtatatttttaaacagatttcaaacactgagttgttgcatgagtaagtcatgaagtcaatttggtaggtcacaatttaaagttgaataaaatagaaaatatcagagtgcattgcacttagtaatggtgagtactagatattattgtaaaatatttttattttgatgagtcttagtgttaaaaagtttgaaaacactgaatgggagaatgttactagattacttgttacttgatgttacatttctgctttatcatgggctgcgaataaatgttagttggtattcttcagttctaaaacattcatttgttaattatttcattcaacatatatattttaagcacccaatatatgccaggcactgttctaagtgtttgctggggttgagatatctatagcaatttacttacaaagcatattttatttctcttactcagagaaaacactgaatcggtgtgcctaaggtttagctgtggataacagaaaactccctttacattacagaaaactccctttaatgatcctttcatattctgcacaccasttctatttacaactcactagccaaaacatacatagtaacatctagatgcaaaggaagcagggaaatgtggttttttattataaagtcagggtttattcccaaggaagagagggagaataaatattggggagacatttagtagtgcctgccataaacctcaaagcttcttacatgtaaacaaaatttcatttccattgatgggaaactggaaatttctattattataattattggaaaggcacaagctttgcagggccactgcatagagttgggcaggttgtctactgcacaagggcagcctgctgagggtgcagataggagagatggtgttcatgttccatttgccagactttgtgtcctggcatggggctgtgtccacccacaggaagaggcacccttctctaattggcagaagacaccttcttctctggccaagccatctgcttaccaaactgtgggcttggggggctactttgcccaaagagatctatttctaatttgcagaaatgccctatatgggctggctgtggctcagaggccagtctcaactagcctagaggtcgtcttaagcatttgaccctgacatacctgattctgtcccttcttctagtatagctcttcttgcctggttttatatttttaaaataatagaagttagctgacaaaactgtatgcattgtcttatcacaaataggcacagagtaaattttcagaggctgagtagatctacaggtcctacagagtctcctcatccctgacctctccattacttctcttccattgtaggaaaggaaattagcattataaattaagcttacattgatctctgatttgaaatggaaaattagatatctttttttttttttaacttcaacaagtgcatgagggagataatggtaccaaacgattgggttcttaagcatcagaattatgaaaagatagaaagggtcccaccctccctacacaccgagaataaaaaaaaaaaaccccacacaaaaccccaccttatctaaggcagccaggtggtattcatcttggaaacaaatgcagagagtggagggaagatctggtctgaaagttggtgtgaatcttttattctttccctgcactatcctaagagaacattaaaaatttatcagcaacaaaggccctgcaagattttcttcaagtaagaaaaccaaaaagcaaggaaaacagagaaggagtttagtctgtttattttatcttcttgctaaattttctctcaccgcacactaagttttttttgagrgcttgctgtcccctcatttttgtgtctgacttgcgtttcaggtgaggtaaagcaggaatcattctgatgggatgctcctctgtgattatccagtgccagatgatgtgcaggtctgggacaacagagagaaacgaacagaataactgcaattattgaatttgtttgggcagatatgtgtgtgttttctgccttcccattgtattgaggtctttccggtgctcatggaaaataagctaggagtgaaatctgtcttttatcatcagagcttgctttgttactttgttacagtttgagtgtctaggaaaattggtctaaacttaaattccactgccgaatgatacatttaacccatcagggagattgtgtgtgtgtggcagggggtggtggggggtgcgtgggggaggagttgggggggttgcgtggaatggaatggcaggcattagatgctgcgtttttgcagtggttctcagatacttcattctagagaagctgctggttggggttctggcccatggaccatttcccctctactgtgggttttaaagtcagtctcatcagcattcagtagtattgtcttattaatcaggaagataaatagggagaagcctgaggaagcatttctttttttttttttccagtggatcacttttcgaggttgccataattgaagagcatggaatgagttacgctctgcattttcaatgaaatgttattcactataaatggaaaatttcccctgctgttcaggcattgtaaaattaatataactaccctgctaaggaaggcatccccaacatgggctgttggaaatccagtgtttttattagtaacagggctgctgatttccatcttgacacatttattgattactctgagtacctggtggtgcatcaggtcctttgagaattcatgttgcaggtcagttgtagtcatttctgcagtaagtttgcaatcttaaaggatgaatatgtgtattatgaaaactgagaaggggaactgacagcctagaaaaggggagtctgagaggtttaataagaattctggaataggaaagttgagttttggggggacagcatttctccatcaccacttattaagatgagggcasggtaaggtacaatttaaattacagcaggtggaatctccctttataatgaggagtactttcttctgatgcaaaagattatgagcctcgactaagctgtgttgctgaaagaagccgtgtaatctctgtttgaatttgaaagaagggtgtcgtgggtgtctgtgttttggcagcccagcaccagacctctttttctttctaagcctgtctctccagccttctggtgattctgtgagacaccccttcagtaagtatcttttctgcttggaccatctggagttagttctcataagattgttgggactcaaataactgaaacaatatgcttcgaatagtccttagttgcatactmggtgctcagtaactggtcagtgatgttgtttttattgtttcttaaattgtaaccaagaagtttgaatcaaaaaaggactctgtggaacaattagtaaacaagaaagagaagaaccaagtgatctttggaatacccctcagatctttgtttctgagccaaaatgcccccatatttccttgttaattattacctcaggaccatgctatgaattacctttcttatgggttatttgggtattcaatagttaaactttattagatgaggttcaagtataatggatcatatactgcattatactctaataaattatatcataatgaagctgtagggtacaagttatgcacacatagtataggaaaggaggctatagacgtagccatttgctgaatcctccaaggagagaggtttatgataagcaagcaaaaataactttggatgtgatgaaagcagtaacccttcaacttggccaacgctagttgcagcatcggcccattggacataggaccatttttattggcaatgacagctttattcttgttctgtcagtattggtcagcttgtcctgtgggattagaatcaggtttagattggctaacattggcaaatacagatgaaaatatgttttagggagtttctgtgtcccctcttaaccacagcctgttctaggacacactgaatctttggggctgaggtagcctatcccttgtgaccacctcaaaatcttctgattctataaaatgcctgggagggaatggggagggagtggaaatggatgaggtgttcattttctataagggaggttgtacttttccccctccacccccgaaaatatgtacagacaggcaaattttgttcttttgccaccaacactcccgctgacttcctggtcctttttttttttttttttttttcgcctcaatttggcttattttaaactgatgacccaagtcaggaaataatagccatcctttactgagtcctttctatgtgttgagatttatgcacattctctttaatcctcttaatactttcaaagatattgattatccccattttgcagaggaggaaacaggcttagattaaataacacaataaaggttataaaggtaataaatgttaggatttgaactctagtttgtgtagctccaaagcctctcctttttctgaaaaccactctctattatcttcctctcgctgttttcctcaaaacctcattttctgctcagagctggcaaccgtattctctgcaaggctaacataacttctgatatagacctcacataagttcaggtcttaagtagaatttactaatgcatttgccttctgcttacaacagcaaaacactcagaactgtgttttgttcatctttctgtccccagcacccagtacagagctttcacacctgcataaatgtttgttgaatagggccattcctgatatgttcccattgcgaggaggtataggaaaagttaggaaccccaaaggagcagcatccatagcatttgacaatattcatgacaaggtaatctgaacactgagaacaaaatgggaaatgcagaaaaacaatcaaccaaatcccagatactaaagtttgtacttcggggacgggtagtcagtgtttattcaggtacctcaaatttgggccagttaaatgcattgagagcagctccagggaagcagcgctcagtgaggaagccacatggccttgggagcaccaccactgcctgtggtgtgagtggcactgcctcccacgtgtgcctcttgtacctggtttttccccaggcagacagaccccagctccaaattccattggggagatgagcggtgtttcactattcagggcctggaaggaccctgaaaagccatttgttcactgcttcccttttctcccagaaggcataaatttattatactaatatatttaatgtattacagatccattgaagaaatgctgggagaaaaagggcagagattggcttttattttaatacactttcctcaaaatacgttactgaaatcctcattgtagccagtctgtttcctccttcctcaaatattttaggaataaatcagcaaacttgctgactttggctgtcacctccattcacctccccagctggcctctggcggtgctagcagtgtagcgtgtggcctagaggtcggggagcagaagggaggcataggggagccgacgggagggagccggaatcatcaactgcagactattttcagatctggagtcattgaacattttctgtcctgaatttttggctgaaacagtagagctgcttgctgagaaccagggcgtctgtcttcccttttgtacttaaatgttcttcttggcgcttcttgtccttggaggggagaagatggctgcaaggagcctttccagctgctgcccttggctgcaggtgggtggatgtgcctcccacctgtccgttggcttggctctctctggcagcagcgggtaggctcgtagcctgtgttccctgttaagaccctttcactcctgtttcgtgtgatccagccttgtcattcttttcccctctgctgatttcagtgggagcttcactctggttggacccactggggctgatgactcactgataacccaggtgaaccagcagttagctagttttttcctctgttatcaaaggaaaagccaaggaagggtggcttctaatttggagagggtgccacctgcctgcctgaccccactgcctgccacctgcctgagtgacagaaggtaggatccatctgtttgttccaatgtgactagatcacaaaaaaacaattagcagcttggaaatgtatttttcaggacacacataaacctgccattacagggaggattctggtactaatttagatgcaaatgggatcgcctgactagagctgattacagaaaggtcagaatgtctatatgctcaatttcactcatacgccgtgcaataagttaatgtgcttctgcagttgtgggcatgatggctgggtttggttctggctttaattttttttagagagctttggttttatagaagtagaatgtgatgcatggtgtcacctcctcccttcccacccacctcctttttaaaagaaaacacactgtccattttgcctatttctgggaagcttgaaattctaataaaaaataaaaacacacttttggagctcttagcctaagacaaaaaagagtagattgactgtaaattcagttgccatcctgttcagaaaactgatctcacctatgtgtgcacttcttccaggccagaccttgacgggttatagcctggagcatagggaactggcgatgagaactggtgggtgaaagcatggcgtagatgattgtgaactgtgctcctgtggtgtttttcagatgtttttggctactgctcacagtcagaaataatattttgtatgtttgcatatatatgtatatttactgaatttgcaagcaaagcacatatatttaatgtatcacattatgtatattttcaacaaaatatgtatacacaagtttgacaaaacaggacttgcccttactacatgcagggcactctaatattttctattggaatctggtctaaaccattaatgaaataataaactgaattcactacccacttttggatttcaaactatagtttcaaaaacaccagcttaagggattggtgaagattctcggcatgaagaaggacccggacaagggctataggagtgtggagaagatgggcagagaaagatttatttccaaggatggactaaacgggactcagtagcagtaaagtcaagtacctgagtcaggcctctattctggaactgacacataatagtgcttaagcagagacattctttagagtaacaactgttcttatcttagggataattactcatttgtggacactgagttttctttaggttatttcagtcattgtggcccacctttagtatgaaataacattcttaagctttagtatccctaaactttattattgcgtatgatatggcagtaaggtagaatgtcatttactgtttctattagtatttctatgtaaattcgtagctacctgcaattctttataaaacaaattaaataaatattgatagtcatctctaagacagaggtcttacttatattagcagctgattgtcctccataatgggtgcatgaagaagatgctactttccagtcttgctaacacttctttggggcattagcagaagatttcgttttacattctgcacagcagagcatcttttccctggtggtttattgttagctttccagtgatcacacttaggctctggtctcatcctcgttaaggaggttgcatatttggggggattagaggaagtttctgaaagtaagataatgggacaggaaaagattttctggtataaaaagctcctgaaggctctgaggatatggtagaaggaaaagatggaagaagggagccagattttcctggtttggttattcgtttaaggtgagtatgatctgtttataaaaataggcaacttaatgcttaatggacttgggtttttaatatttatagcatgttatataaatgctgtccctccaagtgctttcttaaatcctcttagcttataaatgacagctttgatttctaaaaagaaatgaaatattttcatttatccagcctaacagtagtaaacaatagatacttaatgccctcctttcatgttagccctcaaagactgagacttgtagtctaaggagttgattgctgtgctttcaagcttactaaggtcatgtgtaacttaaggggggaaaagctgatgctacattattggtgcaaaggctggaattctgtataacatgtcagttcagcagtgttccatagataagctgaaaatattgtgttacagaaactacatacatggcctgtttggaatgattatgcaacttttttctagtgatcaaggttgttggggaattagatttttgcctaaatcatttaggattaagtttctgctaaaggatcccaagtttgcagtagtgaagtggatgtgagctaatgtagggttgttgtgagtcatttcccccttagctatgattggtgacatcagttattacagagatctttataaaaaacgtctctactttctgggaccttcaggacacatgtagaggataaaggataattaaaagttaaactaaattctggcaaatataaatcactagatctttggggctatcattcactcaggaagaagtacattttatgtgccaggctttgtgcattgcattgaggtaataaagaaaagacacagtgtgcatcccagggcagcattaggagtgcttcayatatgggactagaaaacatcaggaaacacaaagacggaagtagtttgtttcagaagcaggggcagaccatgaaaagcactcttcccagtgcaatttatttgttaaatgtttgatggttgcctatttctgttgctrtatatgggccacagagagctctttacagttggtcagatgacatagtggtgtattgaatgwctgagaacttgcattgttggcaccgagctaggggaaggggatttgcgctatgatatgtactcagaccactgtggaatgacttctcgttagatactaatgcactggataagcatgccttgcttagataaagaaaacagacacactgacttggtaatatcttatccacctgggctcatctatccagaagaaagctgagcaccaataactttttaaaagtaatttaaactgccaaaatagatagctccaagcctttatgcacagatgcatccactcagggctcatctacacttatgtagcagatctggacatctggtttctaaactaatctgtggattttaaaagccgaaaattaaaaggggaagaggaatggaatataaaaggaatggcccagtaaccgtaagataatgtgacaactaacacttttaaaggaagagaatgaaagaagattttaaaaaatggaaaagggaaaataatcactcaaaaagtattgccatctgttttgtttaaaatcgagtgcatttgactcatggtggagggattgctaagatttctagggtgtgtggtattagaatctgagagtttgaactatttctctggtggttttcacgcattcaggtgtggctgtttctttatgcttctgcggggcaattgatgaccctgggaatgacctctattcatcaagagatggtatattctcatcttaggaggacaaagatgtatatgctagctcttaaaatactcccaataaaaatgtttaaggttagaattttgatacttgaagcatcaaatcctcggcttcttgaaaaacttggctcttcagagtcttattcactgaaaaattgacattttactgcatgagaaaattacaccaggtagcatatattaatttgttataaaaaagtcgcagttactttataagcagtaagttcttatagtactttgtaaataacattttatgtgtattattcagttataaaaaatttgacatgcagctctccagaaacacatcggaacatctgtagcactttgtgtctgtactgctcctttgcaatttatattatcattttgcttgtcatagctcatctttctggacataaggaatgttatgttttcagctcctcgtacataacaggtcccaataaatgtttactgaatgactaataaagaaacaagttattccgggctttctaattaatcctttactaaccatgtaaatactttccattatcttttttcttcatttttgattacactctaaaatctttatggtatttgaactgcatttgatgattagagttaccagaacacttgaattgattctttatgcctttctttttccttattgaattaaagggcggaaacagcatgaggtattgtggaatgtgaataggttatgggcttcaataaagctctgaagtgtgttttcgtgggcaggcatgttcttgccttgatgatgtcactgtggtgaggctgggggccacgggagaggcgtgtatcacagcatcaaaaggatgctcacctgtgctcactccgttgtttgtcctaggtgactgtggaagaggtcatgaccacractgcatatctggaccttttcctgcgtagcatctccgagccagcactacttgagatcttcctccgttttatcctattgcaccagcacgagaatgtccacatcctagacactctcacgagtcgaatcaacaccccgtttcgggtaaggagagcgccagaggaagggaacttacaactcagaacagatttcaggagagtttttttttgggaatgaaattatgaatattctcttttgctctcctttttttttctttttcttttttggttgttgttgttttgtggccattaccttctttctatttgggtagagatgaatggaataatgcgttttgttctcagggatccttctgtcaagaggtgacacttactgcctttcctaggacatctttcgctatttctctgttttagcactttcttctgtagaactagcagagtgcacttctgtgggggcaagatgcaagggaacatgtgggcttaagcacagataaagccaaggaaccagagtgcatcaagtctgggtgttagagatcatattcctgtccatgagttttcttgaaatggaagtttggaaagttgtgaatttgggtggtcattcttcattttgaagctctgattaacttgaaaaatactcctccccaaaggctatctctagttaattgcaattcttgttttaaaagcaaaagaatgagaatgtatatatcattcggtttgcaacatatatagagataatatataacaataattgcacaaaggggggaagagggaatagacttatataggagtaatatttctatatttcactagagctaatttaatataaacttgaagtaaattctgataagttaaaatgtatactggaagccctagagcaaccactaagaaaataactaaaaaaagtggaaaaatcttttaaaggaattaaaatgttatactagagaaaatattcaattagcactacacttatcagcaacataatacacattctcctcaaatgtacatggaatattctccaagacagaccatgtgctaggccatataacaagcctcagtgaatttaagaggattgaaatcatgcaaagcatgttctctgatcatgatggatggaaattaaaaaattattgacagaaagaaatttgggaaattcacaagtatatggaaattgacacacttctaatcagtgggtcaaagaagaaatcacaaggaaaatgagaatttactttgagataaatgagaatgaagacaaaatatatccagacttatgagacacagtgaaagcattgtttaaagggaaatatatagttgtgaacacatatgttaaaaaaagaagaaagagctcaaagcagtaacctaagcttctactttaacacactggaaaaagaagagcaaacaaagcaggcagaaagaaaacaataaagattagagcagaaattaatgaaatagaaaattaaaaaaatggagaaaataggtgaaataaaaagttggttctttgacaagattcacaaacctttagctaggctgagaaaaaaagagggaagtctcaaattactaaaatgagaaatgaaagaggaggatattactatcaaccttacagaaataaaaacaattaggaccatgagcaactatatgccaaaggatgacttagatgaaatagacaaattctagaaagacacaaacttatgaaatggaagatctaaataaatttatatcaaaataagattaaaatagaaattaaaagaactactcacaaagaaaagcccagacccagatggcctcactggtgaattctatcaaacatttaggcactagttaaaaagtgatgtcagcaaaatggtggaataggaagacccaggcccttattccctcacagagaaacccacttaacaaaaatttatgaccaaactgcttttgtaagaacttcagaaactttgtaagaacaccagttaagaggttgtagcacaaagccaagaagagacatattgaagtgtgcaggaaaattggtggcattattacctgctctagccatgtcccctccccaacacagtgtggcaagatccagagaaaactccaactactgacttttactttgtgagggaaagaaaagagtgaattgcttgcttcacattacttcttatgttctgtctgcttattgggaaaagaggaataaagtagctgtaagacacacagaaaacaacaaaatggaaatagtaagtccttccacctcagtaattattttaaatgtggatggattaaacactccagtcaaaagatataaactggctaaatagattaaaaagaagatccaagcatatactgtctaaaagacactcactttcgatctaagaacatgcataagctgaaagtcaaaagatggaaaaatatatcctatgcaaatggtaactaaaagaaagcagaggtggttgtacttatatttaaaaattagactttaagataaagagacaaaaaaggacacgagataaggaatgacattaatgataaaagggtcaattcactagtaagatataaatattatatataatacatgcatgtaaaaattatatatatgtgtatatatatatatgcatgtaacatcagagtccccaaatatatgaaacaaacattgacagaattacagagggaaatagacagctgcacaataatagtaggagacttcaatgccctacttaaatagtggataaaaatatcagacagaagataaagaaggaaacaggatttgaacaacactgtaaaccaattggacctgacagacatataccaaatactccacccagcaatggcaggatatacggttctcctcaagggcacatggaacattctccaggatagaccacttgttaggtcacaaaacaaagtttaacacatttacaaaaattgaaagcacacaaataatttttttctaactgcaatggaatgaaactagaaataaatagcagaaggaaaagtggaaaaaattatgaatacatacaaattaaacaacacattcttgggccaaagaagaaatcacaagggaatttagaaaatatctggagacaagtgaaaatgaaagcacaatatacccaaacttatgaggtgcagtgaaagcagtactaagagggaattttatagctgtaaacacttaggttaaaaaagaaaatcttgaagcaacaacctaactatacatcttcaggaactagacaaagaagaatgaactaaactcaaagttagcagaaggaaggaaatgataaagatcagagcaaaaatcaatgaaataaagaatagaaaaaccaatgaaaccaagacttggttttttaaaacaacagcaataatattgattgaccattagctggattaactaagaaaaaagagagatgactcaaataactaaaatcagaaatgagagaggcgacattacaccttatgccacagaaataaaaaagagcataccacaaacaattatacaccaacaaactggatgacctagaggacctagatacattcttagaaacatatagcctatcaaggctgaatcatgaagaaataaaaaaaaatctgaacagacttgcctcaagtaaggagatcaaaactgtaatgataattgaaaaatcttaaagaaaaacccaggaccagatggcttcactctagtggtctaccaaacatgtaaagaagaattaacatcagtcctccttgaactcctaaaaacctgaagatccaggaacattttcaaactaattttatgaggccagtgttgccctaataccaaaactagacaaagatacttcaagaaaactagaggccagtatccctgatgactgttgatgcaaaaatctttaacaaaatactagcaaaaagcattaaacagcacatggtaaggattgtataacatgaccaagtgtgacttattcctagaatgcaatgatacttcaccatatgaaagtcagtcagtgtaatataccacattaacagaatgaaggacaaaacccacagcgtcatctcaattgatacagaaaaggcgcttgacaaattccacaccctttcatgataaaagcactcaacaaactagaaatataaagaaacaactacaacatattaaaggccttatatgaaaagcccgcagctaacatcttactcaatggtgaaagactaaaagctttttctctgaaatcaggaacaaggcaaggatgcccacttagaggtcctagccagagcaattaggcaagagaaagaaatagaaagcatttaaattggatagaaagaagttaaattgtgtctgtttgtagacaacataatcatatatatagaaaaccctaaagatgtcaccaaaaaactgttagaactaacaagcgagttcagtaaagttacaggatacaaagtcaacgcacataagtaatttctatatattaactatgaacaattcgaaaaggaaattttaaaaagttctttataatagcatcaaaaagaataaaatacttaggaataaacttaactgaggaggtgaaagacttgtgcactgaaaactacaaaacattgaaagaaatgaaagaagaacaaatagaaagacattccgtgttcatggattgaaaaacttattttcattaaaatggccatattactcaaaagcaatctacagattccatgcaatttgtaacaaaatcccaatggcattttttgggcagaaatagaaaaaaaatcccaaaatttatatgaaatctcaagggactctgaatagctgaaataatattgaaaaagaaggaaaaagttggagagctcacatttccttaaaacatattacaaagctatagtaataaaaaacagtgtgggactagcataaagaccaatgaaacagaataagaaacagaatgaaacagaaatgaaccgttgtattatggtcaaatgatctttgacaagggtgccaagactacacaataggaaaggacggtttcatcaacaaatggtaatggtaaaactggatatccacatgcaaaagaatgaagttgaacccttactttacaccgtataaaaaaattaactcaaaatgtatcaaagacctaaacatgagatctgaaactacaaaactcctagaagaaaacatggaggaaaacttcatagcaatggattttgtaataatttcttggatatgacaccagaagcgtagggaaaaataagacagatgggagtacatcaaacttaacaacttaggcgtatcaaatgaaataatcaacaagatgaaagggcaacctacagaatgggagaaaatatttatgagtcatatatctgatagggggtagtatccagaatatataaaaagttctgtaactcaccaccaaccaaaaacccaaataatctaacttaaaaataaacaaagtacttgaatatttctatgaagaagacttacaaaggaccaaaaaatatatgaaaagattagagaagtacaaatcaaaaccacaatgagatattatctcatattcattagggtggccactatccaaaaaacagaaaaaattagtgttggtgagaatgtggaaatactggaacctttgtgtcttgtttatgggaatgtaaagtggtgcagctattatggaaaacagcatggaggtttcccaagaaattaaacataggtttagtacattatccagcaatcccacttctgggtatatatctaaaagaatttaaagcacgatcttgaacagatatttgtacacccatgttcattgcagcatcattcacaatagccaagaggttgaagcaacctagattgtccattgatggatgaatggataagagagtatgttatatatatacaatggaatggaatgttattcaaccttaaaaaaaagaaggaaatcttgtcatatgctacaacacggatgatctttgagggtattatgcgaagtgaagtaagccagtcacaaaaagacaaactgtaggattccactcatgtaagggatctaaaatagtcaaacttaaagaaacagagggtaaaatgatggtttccaggagctaggtggtagggaaaatggggagttgttcggtggttactgagtttcagttttgcaaaatgtaaatgttttagagatctgttgcataacaatgtgaatatagttaccactagtgatttgtatgcttaaaaatcattaagacgttaaattttatttatgtgttctttatcaatttaaaaaatgaataattaatacagattcttcacagactctttcaaaaattagaagaggaggaaatacatctcaactcattctatgaagccagtgttattctgattccaaaactaaacaaagacaccacgggaaaactctacactaacatctactatgaatatgggctccccagttctcaataaaacactagcaaatgaaatctagaataaatagaaaggattatacactatgatcaagtgggatatatcaaactaggattgtaaagctggtttaaagtctgaaaatcaattaatgtaatacatcatatcaagataaaggaaaacatcatgattatcaacagcatactcaacaaattagaaatagaggggaacttcctagcaatctgataaagggcatctatgaaaaagtcagagctaacattatacttaatagtgaagaatgtttttcactaagataaggaagaaggtaagatatcttctctcctcaattctattcaagatggtacttagttctagccagggcaattcaataagaaaatgaaataaatgcatttatattaaaagtaaaataatcagtatttgtagatgacatgctcttgtatgtaaaaaactaaggaatgcactaaaattgttagaatgaatgagtctagtaaggttgcagatacaagattaatgtacaaaaatcaatttacaataacatcaaaagaataaaatatgaataaatttttacaaaagaagtgcaaaacttgtgctgcaaaaactataaaacattgtttaaattaaagaagacctaaataaaagggaaaacacccaatgttcatagaccagaagacttaatattgttaatataggaatactccacaaatcgatctacagtttcaatgcttttctataaaactcctatctggcctatttgttgaaatagataagctgactctaaaattcatatggaaatgcagtggacccagaatagtcaaaacaaacttgaagaaacaagttggaggactcaccgtacctggtttcaaaactttctacaaagctacagtaatcaaagcagtgtggtgcaggatagacatacagaccagtggaacagaattgaaaatccagaaataaactcatatatccatggtcaattaattttcaacaagatttcaagaccactcagtgggagaaagaatagtctttttaacaaatggtgctgagacaattggatatccatgtgcaaaataataaggctgaatccacacctcatgccatatacaaaaattaactcaaaatggaccaaagacctaaatgtaagagctaaaactataaaactcttagaagaaatcataggagtaaatccttgtagccttgacagtgttttcttagatatgacaccaaaagcatgaacaacaacaaatgaaaaaattgataaattggaaattatcaaaattaaaaacttttgccttcaagggacaacagcaggaacttgaaaagacaattcacagaatggtaggaaagttttgcaaatcatatatctgataagatacttgtacacagaataaacaactcctacaactcaataataaaaagataaatacaccctgctgctcacccttaacagtgagcggtaggggttactatgcaatctgataaattaacagtgatttgcaggggttactgtggcaatggataagaaggaaacctaactgagctggggaaaggaagtgttggatggtaatattgtgagacagaacagaaaggtttcttaagggaggcgatgcctaagctaagactttgagaatagataggagttagcccatgggggagtcaggaaaaggcattgcatttaatggaaccacgtgtgcaaagacttggaatgggaacagagtatgttgcttctagctaacgacaagtatatgacctgccctgaggataagagatgttttgrgttaggctaagtacagctctttctttacagcattgttgtagatttcattggccagattttaagcccaacctgcctagaagacagactagcatttattctcctgtacaaagaatgagagcttaaaattacttaaatgggccagtatgattgttaaaagcttactctcaaaagggtacaaagattttacaatacacctttgggtatctcccctgtttggcagtttaccttctctttttggaaatcagtgattgatagaattcttgtgttttaaagaactttttagaaaagaacattatctcaccctcagcacaatgggaaatggaaccaaggaaaatgccccaaagccaagagaggagctgagcttgaggctaagaactctgaagggagacttggctaggttatatgcaattttctgcaagccctgtcttgtaaataactaatggcatatttgaaaataactcaggaaaacaaattacctaaataggagattgtgtgtgtgtgtgtgtgtgtgtgtgtgtgtgtatgtgagagagagagagagaattggagaattgtaggtagaatgtttatctgtctggatctttaaaagttggaaatatgagcccagacatttttgtaggaagataattctgcacagtggcataattccagacactggctttctaatcaaatcctataggagaattgatatcctgaatacacattctccctggcagcagcatgctttttatcaaaactgctaaaaaaaaaaaaaggccattatattttgtaattctgatttatttactatctgtggggagtagagttatcgttccaacatctgaactagaatgtgtgtctcttgcttcccagctttgtgtggtgtctctggcattattcagaactctcattggtttacattgtgaagatgtgatgttacagctagttctaaggtgagttgccttttttgtttcctttaaagaaaaattcactttatactttatattactttatattcatatactttgttatttatatactttatattactttggttgtataagctaaaaaggcgccaagcatctaaggaagaaaattatcacgaacattaatttattttttgcattgtttcccaaggttaattttatttgtactattaaaagtttttagagggccatatgcattatattgtaaatatgctcctggaaattatagatagaatgcttgaaaatgttcagaagtattataaaagctattctggtctgtggctgaatgtctttctcctgaagtgcatttataggggacttttgctattaaaagcaagtgttccaaatataaagtgcttttgatatataatttctatgatttttgctttgataatgatacacacagtgtattctctctgatctgtgagtatatttcagttaaattcagtaaaaatttgatgagtatttgctgtgaactgaaaggtagcaaaggtttgtcctttggacrgaagtacaggtgggaaaggttttatgaagtggctgggatttgaggacgagtattaggagtcaaagtgcacagctattaagaagacattcatttggcagtttaataggggactcaggaacaccaaatcttgccttggcccagcaatccctcttcttctctggaacgctgtgagaagcatctgtttttgtgaaggaaagcaatgatgcttccttrttagctcatgatttagccccgaatctctgcacagaactctagaaactcctggttagaccatggtgtacatctttccttctttttggtaaacccagatcctgaatcttggagttgactactctggtgaaaccctaccccagcactgcaagaagcggacccagagagaatgtggccccaaagctgagagaggagcgaagggctagggctgagaggagctccgagttgcgagggtttgtgctcttacatgctcttctggtggtgtggaagcaaaaacgaaaaagtgggactaccagggtcctccagcatgcgctccctgctcctccttccttagtggacttcctgacccttcatttgaccagtcctggggaataagggtgggtggagctgagagtgggggaagagggaggagacctggtcttcccctagtccacattggggttttgacatgatttgagtagaggttactgagaagaagacattccaggtggatgcactagcatttccaaataggtagctctggaaaagccaggggtgtcaaagtgtgatgctggaaactagttagaaatgcaaattcttggtctcctctcggacctactgaatcagaaactctggggttagggcccagcaagccatgttttaacaaattccgggggattctgatgcactactaagtttgagaaccactttgaggagtgatgccgtgcaggcataacatcttgcaaaagagagtgattacaaaatgagtgtgaaaaagctggtagtggcctattgtggagggccttacagaattgtcaggagagtatcacctattagtttttcaagtttaaaagagcttttgaactttttacagttttagattaggtcatcagtagctaatcttaaggattagcagaaaacaaatccaatcttaaagaaacaccctgggtagtctgggtagaacattagttatctttcctaaaaggattatgttagctcctcatcaagcctctactgatatatgacagaatgcattagcaaggcctgaatgaaatccagaacaacttggcaaagccgtttttagtgccaaaaaaaccaggcttttactccaaagtgggtaaagcctgatggtatttaaatgttaaattcttaaatactgcttctttgatggtaggaaaaccagctgtctttttcagtgtacttggaagcctggccttgatctggaggtgcagagcctcccagctctgggtcaccaagtcagatttagtctaggtgatggaagctcttgcttgctggctgttcagtggcctttagaaggtgagtgctgatcacccttttactgctcatatagtggtgtttgttgtgttacaaaagtgtccgcagagatggcatcggtaatggcttctctggagacccagacttgccccttataaagatgaagagatcagctcatggttgaaatacataaatgttcaagtcagggatagtcatttctagggtgggtgaggataaatataccaggaaagtgcctgaatgttatgttatcacaagttctgaatggaataatggaaaaaaaaaaatgccagacctgacgttaggagatgggcttgactgcctggtcctagactctctgggcccatgtttctttaatgaggatgatagtgataataataataatatagttgctcttaattgaatacttcctctgtttctaattctgctgtgctgcttgagggattccaccaggagagaaactgagaggacatacacagaagtcagttgggcacataataggcatgcaagaaaccactggctcctggtatccttcttctgcactgctgatgtgactcagcatgttttggttttggagtatgccacctcataagattattgggaggatcaactgtggtgatgtttgtgaaaatgttttgaaatgctgtaaagcaaggttgtgtaacctgtggcctgcgggccgcatgtggcccaggacagctttgaatggggcccaatgcaaatttgtaaacattcttaaaacattatgagatttttttgcaatttttttttcttttagctatcattagtgctagtgtattttatgtgtggcccaagacaattattcttccagtgtggcccagggaagccaaaaaattagacacccctgctataaagtataacacacattttaagggagggaattttctagaaaggacattttaaactaatgaaaataattcttttcagatttagaatctgtgcaaaaagcaaagccaataaaaaaatctttattcttcaagtcatttaaacattattttaagggacataaaaaatagatttataatctgtcctttttgtttgttgctgccactgcagtcatttgaatatacatgataaacttgcagatctgagaggcagtagagctgtgaagattatgtgactgcgtttaatgaaggtatttgttatgtgataaataaataatgactgtatgtcaatttttattacaacccaaatactcataaataccaacatttcaaaatgatgatccatttgtaacggatactagtttctttcatttggtgaaatatcagaaaagtaagttgaaataaggtacccccaaagacaggatattttagtgagcagaaaaccaaggagaaattgtccacctccacggatatgacatatgataggccaaaggcaggcaggaaatgctgacaagcagtgaggtaacaaatctctgccatgtgcctggaacctcccagttgagacaaaatttaattgcttaatacattgaatactatttctgaatattctttttagagagtttttttcagaagtactggtccattgtcaggtttatgaactgtcttgcctgttgtgttcagatagaggttgttttgcctgaagagaagctgtgtgtatacttcaggaacattttcatcttgcataggagctaggggtttggaggaaaggaaaacaacaacaacaacaacaacaacaacaaaaaccctgtaaagcctgccagcctaggggaaaatgaataggagaaatatggccagaacttctttgaatcacaaatgatctttttgaattcactaacattgctttgtagatgtttgtctattggtgcattgttggggttatcatcccagaagaagcacttcacttagctcatcgtacttcactgccttgttttgcttgtgtttatggtcagtgtagcatagggcaatatgtatgctttgttatcaattgattgtcacagaattattttagaagtgatgatggtttaatttaatgaccgatatccaagaaaataagaaacaggcccagggttataaagggttggggaaatagtgaaaatcagggaggacaatatgtatgatatatatatatcatatatcatattttggacaatatgtataatatatatgatacatattttatttatatattatatatatatttttctttttttccttctgtgttgggggatggctttgcaaaatctggacctctgaagtcagatatttattagtctctgattatttttatagtttcatgaatttaaattctcaaacaaaatacatatagtataaatgaaaagatagtttgatgataaatacctatactaaattcataagtgatttttctactattgacagccaattcattttcatatttgaaatgtggggatattctggcattcattctatttctaatcttttcctgtgagtgatgaaaagacagagacagaggagcacagtctgtttttctattctttcttctgggatgatccttcattttaaagatacagcagaaccactgcttttttcttttcttttgaaaattgatgtataatagttgcacatatttttggggtacacatgatattttgatgcatgcgtgcactgtgtaataatcaaatcgggatcattaggatatctatcatgtcaagcatttatcatttctttgtgttggaaacattacaattattttcttctagctattttgaaatatacaataaattattgtcaactgtaatttctctactgtactattaaatactagcactctatctagctgtatttttgtaccccttaactaacttcttcccccttcccttcccagcctctgtaaccaccattctactctttacttccatgagattcacttttgtagctcccgcgtatgagtgagaacatgtgatatttgtctttttgtgcctggcttatttcacttaacataataacctctgagaaccaccattcagaatactggcgggctattcatttgaatagactccccatttccagtttcgtagactctctttcaaccaataggggatctcccttgatttgatttattcagaagaaaatttttagtttctactgaaagcatgtgtttgtaaagttgcaaattcccaataagtctttattctaatatagtttcaagctacccactggtgatatttgataaatagctttattagctttgatccagtgttccatttttaatacttcaaacaaagaataaaaatctatgaatatcaacttaaatcatgaaatatgcttagtttgagctgtaagcagtcattgctgttccagcagtatataaaagcattgaagcagtttatttcttaaataattaatgaccaaaataaggataccataaatcctgtgtaatccgaatttctctaggcctcaccagcctataggaagagttcacatcaatggctacaggacagattttcccagctctcaccccagccacctcatagaaaaccttgggcccaacccccaaaccccccacccaacacaaaaagtatcacttatcacttctagggatcaccaagtgagaaatcttttttgtttatctgtttttgttttttagagacaggctctcactctgtcccccaggctggagtgcagtggtgtagtcatagcacactgcagcctctatgtcctgggctcaagtgatcctcctacctcagcctcccgactagctgggactacaagtacacaccactacacccggctaactcttctatgttttatagaaacaggatcttgctgtgttgctcaggctcgttttgaactctcggcctcaagcagtcctcccgccttagcttcccaaaatgctgtgattgcaggcatgaggcacagtaccccacccccaaataaggagtcttaaatatatgcatgaacaaatctcccaccacggttgccacagcagcatcagccatggtcctctctcctgctctgatcccttttgttgctgctgccttcccttcccacccctcaacctgctgcccctgttcctgctgtgcaccctggcgccctcctgtggtgctagagcagcattgtcttctctgggtgcccactggggtccagctatgctttgttcacagctggtgggttcacacagaggtgcgagaatgcttctctctcctgtgttatttctggttaccagagcatctctactcacagatatccttgtggaaaagagctcctttattttctgcctgcagcattcatttttcctcattgctaaagtccccaaaactaagccaagaatcagaacagtcttgccccctgttccatactttcctttttgtccttgtaaccttctactttcatgaaactgcgcttatgaaaacagctgccaccacatcagacctgcagggtgtgtctggttcttactgacagcaggttcaaaatatatatctgcccatggagacagtaggaggaggggatgaggaccgccttacctagatggtttgctttttctgaaaactgaaggttaagtggcaagtttgctatatcatacctggaaagtattattaaaaccttcagcatcaagtaccacacagagaatggaatctttctttcctctctgactctggctcttgcagtggatcagttgggaatatcaacttaggttttcctcatttggatcagcaggaggtatgggagatggttgaatgtttacaggcctgaaggcatgtcctgaaagtcgtactttttatcttttttttacaaaaaccttaatcttagcttgtttttctctgcacggcttctttctcaaatgccaaatacagaagcaaaaacactctggctgattgaaagtttgtgatcgttcacataagggattaggctcatctgcaattggctcctgcacacatatgtgatgcttggctctggctataagttctttatcccatttgctccatttttgtttaaataagcagtatgttttttttccctgttaagaaagtaagtcatttaaacacactttattctagccatgaagcccactgatgtgctccaggtgtgtcagaaatggttgctcaggttttcttgtccccaggttcaaaatgatactaagatgcttttgatcaccaaccaaaagtgttttatgtgaaatggggcccagtgatcctcagtgagtcatttaccattatattttctcctggccacacgtaagaacataagaaaaggtttacactatggagtggttgtttgctgctgccattcagtgcctgcaatgagccagagtttctgggattataagagaaatgactgaagcagctccttgctgtggtagcacattatattcaggaggtagactgaagtaattgtgatacaagataatattgcttaatagaggcccatgagcatagtggagggagggattagctccctctcagagaaggtgacactgaagctggactttgtagaatgaaaggcattggtcaggcagagaaaaggggaaagcacaggccaggtaaaggtgacagtgggcacaaaggcatggagtttgaagagggatcgtttaagagatgaagaagttcctggagattgaattataaagaccattaagtgctttgcaaagaggttgttctttcagaagaaattaagctaaggagtgaaccctggtggctggtgagatgatcaattgagagctgagagaggatgagtctgcccctggccacaaggagtccctgttatggtttagttagtcccagtaatggttcaagacattgcagagaccaaacgcttgttctttttgtcattctaggtatctgatcccctgcaatcacatgatgctgagtcagaggtgggctgtgaaggagagagactgttactctgtttctgcggccaagcttctcgccttgactcctgtctgctgctccagcgggatcactctgacgctggggaaccaagagagggattatattctctggtcaaagtgtatgcatgacacttcaggtaggaactcgctagtgatgatctttaaacaaaaggatgccagttccatctcgccttgggatatgtgtccctttgggtagacagggaattatgtggtgggtcccatttctcttatgaatgactagttaggatccttttctgctttgtaaggagttatggacacgttgtaatcagtgtttattgacgtgcccagatgttacgttctgttgccagatctttattttacgtagactttctagtgggatcctcagagtcaaaatgtgaaaacgtgtgctagcatgtcttcggaaacaagacgggggtgagaggtgtggagatggctattgctgagacagaatcagccctaattttaatttctaaaatgagccacttatagaaatctgtcataaggatttacatattattatatatcactataaaacttgaaatttgtgatatgacagcaaaattgcatgcatttgattgacctaatgaggaaggctgccataaatactttacaggggttatgatacttggtgctatttgccagctacagttcacctcatacaagcaaaactgaaatggccatctctgtcaaccttggccctctggcaggcagctagagcaagggagcatctgtatatctttgatggtcatatggctgtttcaattcaggaacattctgtgtgtcctgtgaccactaggaaatgcccagtcctggtgttgagtcaagcgtttccagtttatattctgatatccaccccaacaatgtcattctgtccacccagctataattttcttaggtaaagtgtatttaaaagctgggttacttgactaagaaaatgtcagtatgtttgatattaacgtaatttgtagaaattaaggttgtcttacggattcttggtctttatataaagatgcatggaaatcagcaatttatgtaatttaattatattttcctattaggcaaattagtatggatatcttatattttcatacctaaaagttattttttaaaacatatttaaaaattggcgtctttctaaatttactatgaaagttttttcaagaatgattctgtggctaaccttgcctcagaattcaaaattcaagttaaacctatgattctccataacttgccaacttctctcctggtgtgatcacttttaatgctttgaagaaggtagtattcccattttacagatgaataaacaaactgagagagaggaattgtcttgttcatggttatacagctaagtaggttctctggtttcagatgccatgttctttccactctcctgcctctgaggttgccttatagcagataaatgccctaatggatgggtggtgacatagctagctagctagccagagtaattactgtccggggtaaataatttgcctaagaaagtagcagagccaagacttaggttctgcatcttggttctatgtcttggttctagtactttcttgggcaaattacttaagttttctaaactttttttcttatctgtaaaatagtacctacttcaaagggctattctcaggaaagcaagtgaagacatgtaaagctcttagaagactgcctcgcatgtagtaagtgcgcaataaatactgccagtagtagtatttgatgtctttttacataacatagataagagataaacactaacgttttagcttagcagtagagctataaaatatgaattatgtctaccctaatgccctggaaatgggtatccttaaaagctcgattctgacccagtctggtagagatttagagcatgaagagacgtgaggcttgcaaagatgtggcactgacgtaagaatggaggttggtgtgaaattgcctgtgcttgaactgtggctcttccacaatttgggttgggtgttctttcatctctgagcctcaatttctttatctgaaaatggagaaaataatatctaccatataggatcattgggagaattaactcagatagcattgataaagcacctgcagcctactagatgtttaagaaatgatagactatatatttttccctcagtctttttctcttgagggaaaatgtaaactcataggaagatattttcgcagctatttcagtagtgaagttggaacttttaacatcagaggcagtcatggtaacataagcagcattcttgggttaaaatgacttttgtagtgaatatgattttactctaagagaccatttgataatatcaacatccctgatagtccccaggaagacagaatgagttaataggcttttctaaaaacccaggatttttctacaaaacgtctggttctcagattcatggattaccagccttccgctttagattcaaagtaaaaaactttaaggttattactctgtggcaggtactatatcaggtgtattacctaatttaatcctctcaacaacctgagagattgcgatcatcagctcttctttctctaatgactcgtaccagataatagatttccatcggctatagccactatctgactggctatattggttttctatcttccgtgagggtagagtttctattattaatctttccttcttacaatctaaccatattattcagaggtcattttaatcagatataattagacccaaagtagctggcaagacacagtcttagcccgaatgggtcacaaccccatccactacctttgtccccacacctcccttgttctaaccagcctctgcctcctgtgcagggcctgtggagcggccattccccgaagcgttctccgagtcagcctgcattgtggagtatgggaaagccctggacatcagctacctgcagtacctgtgggaggcccacaccaacatcctccgctgcatgagggactgccgtgtctggtccgccctgtatgatggcgactcccccgaccctgagatgtttctccagagtctgacggaggagggcagtgtgagctcggcctgccctgtgttcgggctcccgcaacaactccccaggaagacaggacctcagctggctcccagaaaggacaagagccagacagagctggaatgggatgacagctatgacactggaatctcctcaggggctgacgtgggctccccagggccttatgatgatctggaggtttcaggccccccagcacccattgatccccccaaacacatccaggagatgaagaagaatgccctcctgctcttcaaagggtcctacatagaagagtcggactttcaggatgatgtgatggtgtacaggctgtgtgctgagaaggactccgaggacatgaaggattctcaggaggaagctgctaggccaccagctgaagcccaggctgaagttcagagtgtccccatcaacaacggccccctcctcagcacccagccagagacagattcagaggaggagtggaatagggacaattcagacccgtttcacagtgagcccaaggagccaaagcaagagagggaacctgaagcagccccagaatccaactcagagttagcatcccctgcccctgaggcagagcacagctctaacctgacagccgcccacccggagagcgaggagctcattgcccagtatgaccaaatcattaaagagctggattccggcgccgagggcttgatggaacagaattaccccacacctkatcccttgcttctcactaaggaggaagaagggaaggaagagagtaaaggagaaaaggagaaggaggggaagaaggagctagaagatgaggaggatgactttgactcttttatagcggagatgcctgctgtagagactgtgccttccccatttgtggggagagatgaggctgcctttgccagtcgccatcccgtgaggactcaaagcaccccattcacaggtgaccatcttaaattgctttgtggtttctgctttcgaaagtacttgtatatattggaacaggaaaggaaggtaggaaaaggtaagggatattatcggtttgtctaacagagggctgcaaatatttttgtaaagatcaaagaggggtggctttatttttatttttccattcttgtaatgattatcttatttatttctcaagctagaggttagattttattacttagtaacttcttttgatatgtcagtgttaaaacagtagggctgattaaaccacacaagaatccagacgtcttatttaatgacttcatttattctagcgtaactaacttatttttctccttagcacttatttacatttatttttaacaaatgactgtctcccccagtagaatgtatgctctgtgagggtggagctctttccctagcactggaagagtgaacagagcacagaataggtgctcagagtccgtgttgggtgacagtagctgtgcacacatcagaggcattggggttagctgtgcctttgcctgggagctcatttcagagaatcacaaaatctttatccaaaaataagtggagtggacccacgtcaactaatagctctttgaaagagtgggtatattcaatgatacactaccagccacaggtagaaatcttgcaagaggtaaagggataggataggacttaaagataggcagattaggatgaggaattatgatagaaaacatcattaaatattagccaacaaaatctgcatttacaaatcatggtgcagagggaatcgccatagatgagagggctcactaagctcagggaaggccagggtgggaccactggatggtgttcaggtagcaaggagaggggctggaagatagtagcaatggagggtgacagtggccttggaccaggccagggattgagtcctggttctagcatttagcagcatgtggctttagcatcccaggccctccatttgctcctgtgaggactgaatgagatactgggaggtcattattcattttatgacacgtagcacccaggagaagcctggtgaggagggactgtgctcctacctcttggagtaacccaaaatagatgaaaacagattgccttctggtccagccagccaagtaggtttatgtgatttcaaggagctcttccagcctcctcctccagtatttattcatctatttactgatgcctgaagatttgtatatacaggaagaaagcttttaattccacaattaaaggcttgcagttctagttgagataacatttcagtctgaatgagttttaattaaaattcaatcagtcagtcaatcataagtaaaatggattagataatcccacttttcccagttgataagggggacagggaagggggagttggaagagttcgcttgaagggaaaagggcagcagtaacttagcatgtcacagcttgccttctcataggacatctgggctatccatagccatgaagattattctttagaatggcagctttcttacagaggagcttcattcctgggaaatgtgtaaatagaggaaagaaagtatagctcagggcaaggaaaaaaaaagctaatccaacaccttattaaataacatcaatattttacatataatacacctgagaactgacaaaacatactacaagctctttgatacatacaggtaattgtcactaaaaccttcctttttcctcttttgaaccttatacacagctttaggaaacatctctctttccatgtatgtgtgctttatagtttccaaacttctgagtgtgttctgtagcattaggcttaacttcttctctccagggcatctgatttctactgaaatgagttcacttcccagcaaaatcaaagcattccatttgtctaattttatttattcatgtgttcagcaatcttttattgatcccctgaagtttggcaggttctatgctaggaaataaggacacaacattaaaggaattcacagacttttagaggagaccccaacaaagaagtgtactcttagtgggaaatgcatgattagttgtcatatgccaagaccagtgggaacccagtgaggggagtgggaatggcctcacagaggaggggcatggacagtgcaggggagtccccaggtgaaagcaggtgagaatgatagtccaggcagaggagacaccaggaggagactgaagagcctgccagcctgtggggtatgaccgcattgggtggggaggtgggagagaagggcagaaagcttggttggtgccagcttatggagagcctttgggccaagccaaggaatggaaaccttgtgccctggcactgaagaaggccctggagtttaaagttgaggaatgatgtgactggatctgaaaaggccagctttggtaggagtgtggggagagcactggagtggggagaggttggtgccaggaaaaacaagtgagacacccttattgccgtgtcagaattcagaatgcgccagtgcttttatctagtaattctgtttctaggaatgtcctcagagctgtattcacactgtgtgctaaggtgtacatacagggatgttcattgcagcattgtttagaataggaaaagactggaaacaacctaaatgcccaccagtaggagactgacttgcttgtgcaacaccctagcaatctaatattttgtggtcctgagatgagacagctctgtatgtgttgacacgaggtgtggtctctagggtgtattgttaaaaatactaggtctctctgtgkgtgtgtctctctctctctctctctctccccctccctctccctctctctccttggcaggcaagataatgcattgggtaagagcactggaacaggtggtatgaattaaaattctattattcacaagctgggttcacttagcattctgcctcctctttaaatggggataaataataaatatacttcctagggttgttttgaatcttgagtgagttgatacatgaaaagtacttagcacattgcctggcaggtaggatgttattaataaatgttttcagtaataattaaatctctattaacatagaaatgctgttgctggagtccagaccggaaatgagactgaccttaggcagtggagcaggggaggtggagcttcaggtccacatcagagatatgtccagggtagaatttgccgagggaggcacggaatcaatggccgctccattcttggacaggggaagtgcaggaagagggtgcaggctcgatggaggcaggggaacgggagagcggtgagtggatgacaggaggggcagtggagagagtctcagtgattttgaagaatgtaatactttgtgaggtggggagtctatctgtcctcttaggagatgtgggaagaaaataaaactgctgtcctccagaaacacctgcggcttcctgaattgtgctgagccttttgattttcagctgcttaccagatccccctcacattttttgttaagcagggtttttttttttttttagtgctagaaactaagaataaagtaggaatttgaaagttttaatacatttttaattacacatgcccaaggagtgatgagtcatttcattagcagatgctaattataatgtcaaagtggactccatttgtatcattacagtctactggccttgacctaatgatattccgtcattcacctaggtcagtgatgacatgatcttcctctccacagggcatgggattcaagctcatgtgcccccccacctcaccccttatagtagtgatgtcctgtggatggtcccccctggtcactgcatggtcagcagtttagagtttgtaggccaagcacagtctgggactggggaaggcacagtctgggactggggaagagaagttgaaggatcattttatggtcatatgttttacagaagactctgcccacctaagtatgtcttaattcacctgcttttgctccatctggaaggaaatagatgctaagccagggactgcgggggagcaggtgagaggaagctgaggacagcagccttccccctctagatctaccttgaaggccgaattgtgttgcgatgccttaagagttgccattgacatttctggggttctttatgggaaaaccattagttgctttcaaactggggtccctatccagagtttccaaatgtgtttggcaagtctcccagttgtttgttaagcatcttcaaagagtctctatctgaagagttcattgacctcttatgtcatggaaagtgactaaagacctctgcctcccgtcccaaggatggggaagttgaggctaaatgccacacatgaggggatggtgcctcatgttgagatcccttagagacatccttagtgttcctggagacagggatattgcagttaccctgttcctcccctgtgtggtaaaggtttcggtttggtgttcccattccacacacagagcttctgttccttgcaaagggttttactctcttatgctaccagggcttctgaatgaaggaagcatcttgtgatgaagtatgtttttgttaaactcgtattaatgttggtgacatcttcataaggcatggcttatatatcaagggatgtgtgctttcgttgtaaacatgccatggtttagtagcatcatcaatagctccaccaagggaaatgcaaaattctcattgattgtgtttaacagaacacttttatggtaaaaatttaaagtatcttcaagtaagtttattaatgccagatttatttttggttttcccctgccctcaatgaactcaaagcatattaattttctagtgacccaaagtagcagaaacttctttttgcctatttttcttaatggaccgcttttgtatgactaattttttaactgcttttttaaaatgactgcttttgtagtcatacggattttattttttaagaaatctgtgacatgccgaactgtatctcccaaaactgacacccttttctctctcctctgaaaattcacgtgtggttaccgagttgctaaggctactaagattataagcaggggctcctccacctctcacctatttttttttattgttccacattacgacacttgacaaaaccaaatttttctcagtgtgcttgttcaggataggcaacccctgttgacagtgttgctatttgataaacatagtttgtgcgtttttggtgttctttacagagaatttttcattactaagacttttaatggcctttggtgcttacatgaaaccctaccgtccatacagtctgtgcatcatgagatgatggctgtcatgttttaagcattggcagccccaagaaatacaggaatgatgtagaaaagcatattttaattttaaaaagttaaattatttgtttttttttcccgagatctgtgataattttaataagtatcaaaactgctcatggagtgaaaatgtcagtagccatgcctatttttctgttttctttttgccatggtggtttgttttccgttttggttttgaggcaggagaaaacgtggccatatttgctgtgtctggcttgcacctgtgggcccatggtggtttgggagatgtggcaccgatggttctgcaattgtcagggaaaggcatccctgtgagcccagccagccctgaagccttgtgttcttcctgcaggcccattcatcagygtagtcctgtcaaagctggagaacatgctggagaactctttacatgttaatttgctgcttatcgggatcattactcagctagccagctacccccagccactcctgcgctcctttctgctcaacaccaacatggtcttccagccaagcgtccgctctctctatcaggtatgttagctgaacccacatccacacctgttgattttgtgggtgctaatttgcagggcatctatttctctttattttgtttttcaaaaattcctttgctctaattcatttgctttccttccctgtcctattaagctcactgtgtagtttattctagacaaactgtagagcttcatttagtttgatgttttgacggtgccctacgcagaacacccaggcagttaaaaatgaacaaatgtctaacatcataatagttcccataatgagggtgctacctgcaagatatattgataactgggagtggaatttcatggtgaggcattaacatcagtaatgctgtttttgacaggtccttgcatctgtgaaaaacaagattgaacagtttgcttctgtggagagagacttcccagggctcctcattcaagctcagcagtacctgctcttccgtgtggacatgtctgatatgacccctgcagcactaaccaaaggtaagccaggtttctccacagcgcccctccttaaattcctcctccacgtccctggcctactggcctcagttcacagatgctgcactggcttctggatcctagaagcattcagagatattttcatttttatgcaacagggaggaaccacctcttagcattcttaaacctaaagaaaggtctgccttgctcacacctggcctgtttcctctgtggagggtctagaggggattttgtttttttaactgagagtggtgcctgcaaggagctgatgtgtagggtattgtcaggctagaataaatcacacggcacacatgggccagaaagaggcattatatgcactctccgagccatttttttgggcagcctgttctgaggagggcatgtgttctctttattatgttttcagaggctcttgggccaaaaataagtgtgctttagggccctaggaggtaaaacaaaacacaaaacaaaaaaacggtttggactgggagaagtaaagtttatgctcagcctaaaatctctgagagtgcctttttatgggctctagaggagatgttaggccagggccctggcagagtgaggagtgggggtgggggcatgggtcggtgctagtaggagcgctgaggatggctggccaggcctgggagcaccactgctgctttaccttatttaagctctggttggaccgatttgctgaccattgtcccctgagctgtgacttaggccttggtaggagcaaagcaggaatgccccatattgcactggcttttacttttccacacacagaccagtcaggcttctttgtggcagatgaacagtggggagagtaaggctctcagtcctgggccaaaggcaagtgatcagaaacaagactggcagtgagcggcagaaatgaaactcagggcaattgttccacctttcaaagaagctgaaaagaacccagaactctgaagtcctgatgctgcccctgtgcagctatttgatcttggttgctttacctcacaggcccaatgtcccttgacttttaaatgaaggatttgttctccatctcttaggtgctttccggctgaagccagaacttgggttgtgatgagctcttagggtactgcaagttaggatttgaaagaaaggtaggccatgtgccactggtaaagcgaggagtcgggctttgagaagagcaggcaaaggcattcatggagggaaagaagcctggcatctctgtgagaaggtagacttcgggtgccatgtggcctccttagacacatgggtggtaagtgtgtgacctgtgttcctcctgaacagggcgcatgctgctgccacccaccctgtgagagaaggtacaccaattaccagtataataaaccactgcaaaaactcattggcttaacacaaggccatttatgattgcttatgaatctgtgtggtcatctgggtgttttgctgatctgggccaggctgattttacctggactcgcttgtgtgtctgccatcagtgggtggctggatgtctaggatggccttactcacatctgtggctgttggctggagtgatggaggtgatgggggtgtttctcaccatccagcagattagcccaggctggtccatgtcacagttaatggggttccaagagtgagagcagaagcatagaaaatcttttgaagctcagactcggagctcacgtaaggtccattctgcagcattctgttggccaaagcaagacagagggccagcgcagattgaagaatggagcaaaaaccccacctcttgatgggaagagtgggaagagctgcaacaagttgtgggcattctgcagtctcctagacaaggcctggtcttcattgtattttacagtttataaggggctttctcaagcggtcaattttcattatcaaacagtgctctgaaaagggcaaaaaaggcaccattagcttaattttcattaaggaagccaaaattagaggtccagggtattcaaccaggatcatgaaactcaagtgcctgagcccgtcttagctaattcaaggagatgagtgtacacactgaccaacctagatatactgaggtgcactagatactcagggtacactgagccttaacccctacattcagggaaggggtgggggtcactcacaccttaggcttgtcctggtttcagaatgtctggaggccatgattgcaaaatatgtgcccagggaacttgttctcactgcctaaggttgtcaaattagttagctgggttccatgctccttaagtaaggtctgtgacactccagggctctgacctgtaagaatcttctctctggatataacatttttcttttacttgagtttttttagattaactttctaacttttccaggttagccaagtcatactcttcccccacttaaagcatctttaactgacagaatgagagtttcctgtccccttgtacaaagctgacttctgaagcatttactgtgacatgatttcctgtaaatgagtcaaatctgggaggcctgttctcactgggatacagagcaatttacaatgaagaattatggtaatgggccaaatatttgggtttccaagtgtctgtgtgctctgccctttgcctaatgctgctgccagggagatgaacacataatgtatctctctcctcacttctgaaatcttcccagtattagtcttgaaaaccttgtgttgcagcttttcagacccagggcaacatttcagaagccattcctaattctgacatttatttatacttccctccgtcctgcctttttcttcaggtgctcgtgcatgcttgttggacccttttatgaggggcgtaactcaggcgtctgtagccagagctgctccattatgcaggccctgcattcccttcacctcctggcagccccgatgaaaaacgagcctcctcactaatgcttccaacagcagtaaaagtctgtgtggccgctgctccagagagagcggacgtcctgttcccagttccacattattattcttgaggctgttggtctctgagattcagccacttgccatgcctttctctttctactcaaatactttccaaaccacagagtaacagttcactgtatttacttatattcagagcccttttactgggcactgattctagaagggagatcaggtaggtaatggccccagtttacagagatggaaacagacattttatgatgagctggtggccaggtagggaccataactcgggtctgcttgcttttgaatggagaatttgatggtgcttggtgacacactgaaaggccaagaccccggaggggagcccgggtcaatgtgctgccaccactgatggaatcatgctatggatctcccagccagcccctggtctccctcactgggtgttctgccttcattagtgaagacagttctgattcttggattcatactgggtaaatgagccttagcaatgacactttttattcacagatcaagctagacaaatgagtcacaaaacccctttttaggggggaagagaatgaatgaatttggaagagaatgaatgaatttgaaggagaatggggagaggaatacgagcagctgcagggagaatcaggagtagggaagactgatgagatcagttccttcactcatttattcagcaaatgtttattagcttctgtgaatacagaagtgtgttaggggttgctaaagacatgttatcagatagggctcagccctgagaaaggttggagtctagcagaggtgataaaacataaacaatgtgaggctgaagggcaatgcaggccttagttggtcaataacatggagaggaggctagaatgagactgtttgggtagagggcagaggaaggcataaagactataggaatgacttctgggggcaggaaactggaaattcattgtgaagttggtggcaactgtactgatgaggatgatgtggtagctgacacccattcagaggtccctgtgtactttatacctattgactcatttaatccttataacaactctatgaatagcttttggcaggtgaggaaatagaagtacagagaggtaaagcaatttgcctgaggtcagccagcaagtggcagactctgtggtcttaaccactgtacaaataatgcctctaaggctagtaagatttaggtgagcagagaatggggcagggaattccaggtggaggaacaagcatgaacagtgcaggtctcggtctgggagtaggtccatggtgtcccagtccccattggaacgcaggccagcttcctttgtgagctttgctgggcgctttggagagtgacagggcctgagctagggttggggatgagaaggggtgctctccaaggttgacatgtacctcagtgacatcaacacttttgtgctcactctgttgccgggacatgaatttctgctgaaaggtagcagaagacagattctcagcaacttttccagttctttatggcattaaagctgtgataagccttaatctaaaaggatatttaaagcagtcaagtggaagttgttttttttttttttttttaacactaaagactatagtagtgagatgtggaaagtactataaatgtcaagaatttttagtactgtagttaagcaacactctgagaagagtgttgaaaaatggtactgaattctaagaagcagccaaaataatgaagaacttgaatataatgatttataaggagtaatgagattgtttgggtagggggcagaggaagacataaataattcctacaaatatatgagggctgatgatgttcaggaatcaaatagggatgttgaaccattttaattagtaaaaactgatttgataggaaaatgcaaatcacttggatatgttaaaatttgaactcatcttaagcctatgttattgaaattgagatgggaaccctccttcaatataggcttctaagccatttgctgctactaattccccatggttgcaggaagttcttaatctggtctttccagcacccaacttccttcccttccattatttctgctgatctcaaggaatcttccgctctccttttatgtaaaacgttggaggtcctggccagaagactggaggtcaccggggagcccgagaggctggagcacccgctgcagagagcttggagtgacccatttcacccagcctccctgctggagctatgctgtgctgtcagggcttaactggcaaagggagaacagtcatcccagcatgagaggctggcagagcaggcgggactactcatcgccccttaataagccaatgacaggagatgcctttgtcagtttctcccatttccacattctggcatggaggattcttgacaaacctatattcttgccatgatttctgcatgaagttccttag

SEQ ID NO: 97356 - DNA, 24505 bp, Homo sapiens
  misc_feature (1)...(24505): n = A,T,C or G
tggcctcaccgtacagcccccggggcccgttctgcccggtggcggggtcgggcgccgcccacatgagcagggggttctgcgagtctcgggggaaagcggggtcgggccccgacgccagctgtccccccgagaagctccgcagcgcgtcgctccaggagtgcgaggagccatagatggcgctgccgtccagccagcccgtcacctggttggcctgcggggcacgcggcgggtgagcccgggtcgagaggcggcggcgggccagggaaggccggggcccggcgggtgtccgcggctggggagtgggcgcctctcccctccaggccctgccaggcccgaagcccaggccccacctggctggggtgcggtcccttcccgccgccttccccgcctcaccaggtcccgggggttgctgggactccgtccggtctcggggtcccagcggctcctctggaagggcagcaccacgtccccgcgctggtcggggtcgaacacggggtctccaggtgggatgcggatgttgaggaactcggcggggcaaccgggcgtttccacgctcaccacgtcggaaagaacatggtagcctgcgggcatggggcgccaatacgtgacaaaccgtccgtattgcgccctccccacggccagggcggcctccaagtgtcctcaggagccaaaagacagaggtcccagtgccagctccgccaccagctctgcacgttagccccaggtagcctcaattttctaatctgcaaagtaagactatagtgagttcccttcctactcaattcataaagctgttgtgagaatcaaaatgatataatttatgtaggggtaccccaagtcagtcctcctccctctgggctagggggaggtaaaatggttacaaacacacggtgaggagagcggtggctggggagctcagttcccaagagctataatgggggtccagtgacacccctaggttggaataaggcgtaagagaaaggttagatacagagcaaatatctctgtatcaacatcccaaaatctctccgagatgaaggcagtctcgaagtgctgcgtagagaggaagtggttgggagtcggatgggtctcctgtggactcgcagacgggatctggcccctcccccaggctgagcagagcgccagatcaaccccactggtctccccctttgccctcaccaaagaagacccccagtacggtgcggttgtggagcgacggcaggccggctatgccccgcgtggctgcgttgctgagccggcgcgggttgggcagctgcggctcctccagagcctgatacacaccgtcggcgtaattggctggtacgcggcgctgcaaccggcagcctgcggaggcagggagcggggctctgtctaagcactccatcccctaggatcccccaaacctcgccctaagcctccctcaacccccatcccacttcactgacagaaccttccctcaagggtctcttggccccgggagcgcataagattgcgctgtgtaggcagcggagctgctgggcgcgtgttccccgcagattccccgctcagggcctttcgcgccccggcccttcgcgagccacggccccagcacgcccgggcccccagaacgcaccaacagcaccacgctcgtggtgcctcaggttgttaaaccagccgtcatagcgctgcacttcccagggcagtgagagtgcgtcctgactgcctgtgggcacagagaagggcctcctcagcactacgctcccagctacccctcccgagcaacgaaggccttggccagtccttccccagctcgcggagcgcccctaaccggacccaagtgtcgggccgcactgggaagtttcccatcccgctgagctgcacggcgaaatgaccttccagtctcagggagcctcttgccgcacctctccccgccccacctcccagggatcctggggaacaccccgccgctagaggagcctgatacttgcccgatggacccagggatccagtcagaagagctcccaggagcatcagtgcctctggtcttgcacggagcatgccaaccctgcagcctgcggggtgagggtgggggtggtaggtggtatgcgaaagccactgttagggcgtcctctatgcctcccctcttgttcctacagctagtactggaggaggagcaccagctgtttccacttctggaaggtagctgttagaagcatcaccgaggaccttcatccaaacgccactctttccaggacaattggcagctctggaggcattgacactgttccccatccgccaccccatcagagagttaacccccgaccataggaacccactgggcaggagtcttctggggcatgtcagtccagggcaggactggtcaagcctcccagggtgtgcccaatgtctccaatgtttcacctccacccgcccccaatccgtcaggctccgcttctcctccaggaggcagggaagggaaaaaggttactgacctgggagtgagggactgcagcacccttccacaatgaatccccccttccccaataaactccccttctgcaatgaacgcctgtgcatgatgggcgagggctagggtcagatcccaaactctggtctaacctgtggtttagggtggtgttgggttcagatgtcttctttcctcttaaaatctttgcttctgtgctctacttcttgccttcaccctcactcttccagctccgccgatcctcagcctccccggctgcactctcacctttctctctgggtccttggtctcgccactgtgcaggtgtcggctcaggacagacctgcgccagtgtgagcatctggacctagggctcaccctcctgccgtggaggtggggcccttatttgcataacctcttccagctcagaccagcccctgggctgggacacccgtgtggcacgtcgcccacgctgctataaaaggggtcccgcgcgacttccaaactcagcgccaacccgcagaaccaggaaagtaacggctacagacagtgagaaatagtttcgctcgccggctagaaaaactctgtcggtaccaaccccagagcgttgagagcagcccacctccacgcttccttaacggagaggtgcaggactcagacttcaccagcccactcggtcccagccttgtacgcaaagagacgccaaggacgcgctctcccgcgtccaggcagccccagcttgctggcttgcctgcccgcctgcgtgcagcactcggccggcgtgcagcatgaccctgtggaacggcgtactgcctttttacccccagccccggcatgccgcaggcttcagcgttccactgctcatcgttattctagtgtttttggctctagcagcaagcttcctgctcatcttgccggggatccgtggccactcggtaagggtgtcctcatagtgcaggtagagtgggggaaggctcatgggcagattgtctcctgagggacccaggacaggtaagactgtacaagagcctccatgaatagtcgaattgaggctcaggtggagtgaagtcaggagtctggtgcagcaagcacccctttccaaggatagggagagctccccatccaggatatcctggagaaggaccccagctgggtccttgggaaggctgctgcagagaatgggcacccagtccagtaatcctgaggaacagtctaggcttcttgtgctggagggcctcccacctctcccaggactaaagctgcactctcatcccatccggtgggtgatgaccttcaggccaaaaggacagatgccagcagctcagactgcagtgttcccctttgcactgggttgagacacatgtgtatgggtgcctcatcctcaggactgagactcccacattggattagaagttggagccaactgggtgcattgtcttagactttccccctctcccagaacctaggttgtgcatttttcagttctgggaggacccagcttttctgcatcttaatctgtgttgctttccctggaactggtgcacctaggagtatctgcattcccacctcctcccctcggagatcaggctggggcctccctcttctgagggaggtgacccctgcgtgcctagcacttctggactcactgagcctcaccaagcagtgactggaccaggaggcagaaccaggaccaggcgccagacagctaggggagtgaaggtggtggaagagtgccaggaagtgggggtggaggggaggtgctgttagggtagatgggaaatggggctagggaggtgaaagtgcgtggtcacaaaatatcagaaatgccagtagcccagagggacttgcaggaaaagcgtgcctaacattagtctcaaaagtctggatataactaaagatccaggtgaagtggggtcaagggtggtcttggggactctggtttggcagggctcaggcctgacccgggtgcctattcctgcagcgctggttttggttggtgagagttcttctcagtctgttcataggcgcagaaattgtgggtgagtgtgtggtgcagcccatggggagaggacggggtgaggaaggaggtgggcagagggcacctgggacaatagggaactggggttggttttctgctccctcttcccactctccagctccttctagggcccactttttggcccttaccatgcaaccacattggacctctaagtccccatctctctgcagtgtcccacctcccataccactctctaattccattttcccaccctcatcccacccccaccgtgtgcctttccctacagctgtgcacttcagtgcagaatggttcgtgggtacagtgaacaccaacacatcctacaaagccttcagcgcagcgcgcgttacagcccgtgtcggtctgctcgtgggcctggagggcattaatattacactcacaggtgagggggctggggctaaatgaactcctggagctgggagatccccggttaggtgagtgtgtcagggatagctggagggcctctcacatcccacaagctcaaatagcttgtggtcctcgtggatttgcgttttctccaaccaccaccgaacccatttctcccgccgagagcgccacacccccactttcctgtctgaatccgcttagttgcgaggtctccgaccgcgggcagcccgatgagcctgcctcaccccgcagggaccccagtgcatcagctgaacgagaccattgactacaacgagcagttcacctggcgtctgaaagagaattacgccgcggagtacgcgaacgcactggagaaggggctgccggacccagtgctctacctggcggagaagttcacaccgagtagcccttgcggcctgtaccaccagtaccacctggcgggacactacgcctcggccacgctatggtaagcgctggagggaaggctgtgtgcacgtgtgtgtgtgccaggagctgggccgtatgagcgggaggatgcaggcctcggaggcactgagcagctgcagccagacccgacgcgctcggggtgggcatgacagcctcgcgggttagaagatccacgagatctgcacagacggaatccggagagactccagccaccgcctggacctcaggagcccgcttctcccccggggaattcccctgcaccgctgccatcccagtccctggctttggcgctggggtagggataaagaagagcgcagctgtgggaaccccggtgggctgggagaagcccgctcacagcgggttcccccactccccggcagggtggcgttctgcttctggctcctctccaacgtgctgctctccacgccggccccgctctacggaggcctggcactgctgaccaccggagccttcgcgctcttcggggtcttcgccttggcctccatctctagcgtgccgctctgcccgctccgcctaggctcctccgcgctcaccactcagtacggcgccgccttctgggtcacgctggcaaccggtgaggaccgagagaatgggccccgggggctaagggtggagacaggattcacaccgggtgtgcactttccagtttacagaatgaattcacatctattaccctatttgcccctctcaatagttcgcagaaacaggcactgttatgaccattttacagatgaaaagtggggggctcagaagggtttggtgtcttgccgtgtttcatgtaattcagattagaggtgtgtggcgggaggtaacacaaggggtaggctccaaaagatggaagaaggcccgggcatcacgcctgtaatcccagcactttgggaggtcgaggcaggaaggtcgtttgaggccagagttcgagaccagcctgggcaacatagccctgactccacatgccctcctttctttcgatccccaccgccacaggcgtcctgtgcctcttcctcggaggggccgtggtgagtctccagtatgttcggcccagcgctcttcgcacccttctggaccaaagcgccaaggactgcagccaggagagagggggctcacctcttatcctcggcgacccactgcacaagcaggccgctctcccagacttaaaatgtatcaccactaacctgtgagggggacccaatctggactccttccccgccttgggacatcgcaggccgggaagcagtgcccgccaggcctgggccaggagagctccaggaagggcactgagcgctgctggcgcgaggcctcggacatccgcaggcaccagggaaagtctcctggggcgatctgtaaataaacctttttttcttttgttttttaaaaactgtttttcccattaattttcatggcttctccgcgccggggtcgcacgtcctcatgagcttcgctgggctggagacagcctagtacactctccgcagtgctgtgaaacctgattctctgcgtcgactccagagtaataggggcgccctctagtgaggccggagggaccctaccagagctagcatctttctgaaccaccccagggggacgttaggtggcagtgatgaggcaggtcacccactcccccgtcctggatgccactcagctagcccagctgagtggggtgggaaggaatagcgttttggagttgattccctaacttcccacctggcttcttgtgaggtggtgtttgagggccaaggtaggtgtcagcaaggcatagaaagataaatcccaagattcttggcaagtcttgcaatcttatgtagcaaatttgggaactgaagctcaaagagaatgtggcatagttggttaatgttagacctaggatgagaagtttggtttcccctcctttccagtgctgtctttcattgtaccaaaaggccacacaagctggagaagtaaaggaagaacaaaaggaacccaggaaaaaggaaaacaagaggtgccgagggatgagaggaaaccataggagaatcatatgtaacccccaccctgctggtgttatgggggtgaagttaggtttcagtgaatagcatcttgaagaggcaaggcagcacggaaaggctgggttgctgtgcagataagctagcccctgcttggccttatcatggcaacaggctttatggacaggcccagcatctcttcagtcccttagggctttttgttttgttttgttttttaacatcagtatatagagcctcctttttctactccgtctgtagattggtgctgggtgtctggtaacagccaccctgagggcagttctgctggttttatggggcgccaatgaggtttggagccagactggaagtccaggtggcctccacggggaggaatgttataaagcacaatcaggatctttggggtgtgcctccttacagtatgccttggtggaggaagcctctgacaggggaatgtcctgggacttgggactgtcagccatggaccggtagcgggggctcaggagtccaccttcctcaggactccactccagcatggggtcttcatccacactctggttgaagaaagccttcagcctgtgaggctgcatcctgtgggccaccgccatagccaggcccagcagcacacacagcagtcctggagatgagggcaacaattgtcccaccttagtgctagtaacaccygccraggatatcttcccctgggagtgtcagaacaactctaagggaagcctagagcccctgcttcagggcaacttgggctcagagaggtgactggctgaggggcatgtggctggtgtggctctgttgtcctaagtttccagactccaagcccagtgctccttctgttatatcccgggagagagagagagagaaagggggagagggagaactctgaaaatagggagagaaaagaaaaaaaccctggggaagggcagggcacagaggaggcatgaggaggcacatgagggagtagacagcgggacaggagaggagaataagactgcaggacaatttagggatgtgtaaggcaggacagggaagggtttaagaatggggacccagagaagggtatttggaggaagcaagaggggacagggggttggaagattttagaagcagctgggtgaagagagttaggggatgacagagacagagaagatacaagggagtgggcatctctgaggaggggggggaagtggcactggggagagaaaatcaggagataagagatacaagagggtgggactttaaagagggcaaagccatcctggcctccaggaacagaccctcaactctaccgacatgatgcccccaggccctccctccctggccttgagacttctagtgcttgtctttagggctgggtcttacctgtggtcaatgtgatccagaaggcaggcccatggtgagtatgcagcacagaagcgcccaggtgcaggggacagggtgaggtgagtgatgtggccatggagaagaagagcagagccaacagctggaagatgcccgtggccaatagcatgtagccaccatataccagcacaggcatggagagcatcacattggccagcagccagcagaggaatgccaccctggagagccaggacccagtgaggactggcccaggtacttctacctgctggtgaatttggatgggcccaggcggaggttcagggacccaagagtgacccaaagatatgaggtagggattccttcccatggacttcccaagccagcaccatggggactggtgccaggccaccccacctgagatacccacatgagtggaggagagatgggtagaaaccctgttcctgaatctaggctaccagggcctccaccccgtctccttcccatcctcaccatagcatggctgaggtgtagtgtcccgccaggcggtactggcggtataggccacatgggcttcttggagtgaacttctcagctaggtacaacacagggtctggcagccccttctccagagcctttgcatactcctcagcatagttctcacccaggcgccaggtgaactcctcgttgtaattgatggtctcattcagctgctgcacgggggtccctagggcacaaggcagctctgctcagcaggaacccaagggccagagtggggcctaggtagggactcacccacactgggcagagggacaggaagtggtctcaactgagagaaggtagcttccaaggccctgaatttcccttcctaccatgcctctgacctcccacctcacacatcctcccagcccctgtgccaggcatcctatagctctttgaccacaccaaayatagatcccaaagatggcagagccttcccccccaccacaggtaagagccctccctcacctgtgagtgtgatgttgactccacccagcccgacctgcagcccaatatcagcgctgatccactcagaactgaaggccttgtatgatgtgttggtgctgacctggcccacagaccactcagaactgaaattcacagctgtggttggggagttggacatatgggaactcagagatgactgggcattactaggttagagtcagaaggagaaatacaaggggtccatgtctgttttggtcataactggatacccgttaacyagccagggtctggctcatggtaagtctgccaaccacatgtgtgggatttcccttggccatattctgtttacctcttccctccctttctccctgctttagggagagtcactcagggagctgggaaggaaacrtgaaccaaaaccatgccaggcaaggcaaacgcagatagcttcaacaaaaactttctttgagacggagtcttgctctgtctcccaggctggagtgcagtggcaccatcttggttcactgcaacctccgcctcccgggttcaagcaattctcctgcctcggcctcccgagtagctgggattacaggtgtctgccatcatgcccagctaattttttgtatttttagtagagatggggtttcccccatgttggtcaggctgatctcgaactcctgatctcaggtgatctacccacctcagcctcccaaagtgctgggattccaggcatgagccactgtgcccggcctcacggagactttcatctctcctatttgcctcatcaccaaactaaagcaaacagctgtttcccatttcctcccttcctttctggggccctctccccacagacattcattttgacctcctttcccccgaataaaagtgttaggaaggttgaggagatgcatccagcttgttttccagggtgacacctctccaggcaagggtaagagtggggagataaggccatggtgagagaarcatatgggcagggtctggaagccaccctgaagcaagggcccaccgctgtggggaaacaaggagaggagatgcaggctgctgagggagttgaagggatgsaggcagcagcccaagtcagctgcacttcgcactcacccaggattgcagccccgatgaataagctggtcaccacccgaagcagccagaacagcctctgagtcacaaggtaggtgggttaagtaaagagtgccttccttccacatctacccttcctgttwccagacttgggggaggggcgggaattctaaagctgagatcacttggtcaattgaaatcagagtgtctggcacataataagtgcttatgtatttatgtatgcatttatttatttattagagacaggatctcactctcttgcccaggctggagggcagtgatgcgatcttatatcactgcagccactcaagtgatcctcccacctcagcctcccaagtagctgsaactacagatgcacaccatgatgcccagctatttttttttttttaagagatgaggtctatactataaacccaggctggcctcgaactcctgggctcaagcaatcctcccacttcagcctcccaaagttctgggattgcaggcatgagccaccatgccccaccagcgctcaatagtgaactgctgaatcaatgaatggggagctttctgcctggggtcgkggctatcttttctccgcactggggtctccttccttagcctggttgtagtcagagactctgaacccctcagcctgaggctgaggtctctctgggctggggtctccaggactgggtttctcaccgtctttccccgaatgccaggcaggatgacgatgaacgtggccagtgcagtcagaaagatcatgatgatgctggccaaagtggtgtccatcrggaaggttggcttggggccagcatagaaggggaatgtgtgtcccaaagtagccatcttggtgaggtggtgcagggggggcaatgctgtacaacaacaatagacatttattgcatgccctcaatgtacctggcactgtttttagtgctggagatacagcacagaatgagccagactaggttcctcttctctggagctcacattttgtgcatcatcagactctgctattaccaccgttccactgcccctcagccatccatctccccatcttttaggtgacagaatgagggtctttgccatcagtctctgttgccccattctcctctcttaayctccaggttccataagtcagtgctaccaccaccctgggggcttctctgtttcttctgggactgtctcaagaaataaaattctcttctctctccttcaggcccctagcacagatagatcacagaacataaaaggagctatattatcaggtgaaggcatraggtgaaagatggtacagattacaaaaagattggctttcttcctcagtccccaaaggaacaaaggccaggcagctctctgctaagtatataatccagccacatcatcagaggactgaattccagacctagcactgcccacacaggtctgtccagctttctcaagcaccctggctcttgttctggtaactgcagaacagttgagcttcactgagttcacctaaataagcactgaaggggcacctgccctctatcaggcagtgctggggccagatgtccttctattccacacattaccaacaatggcccttctctttgattcaaattcccaggccaagtttcagctcaaacgctagctgtggtcttctctgcccatcccctgatctgagaacttgtttgactcttatttgttcttttgcagacaggatattgggaaaatggtacctgaacttaatgtgtttagttaaatctcagacagaatggattgcatgacacactactattttagcacaaataaaggggaaaaaaagtcttgccaattaaaccatggccaccattgctggtgagatgtacctaatttcagagatgtcagaatgtgaaaaaaaaaaaatgcatcttagagtcaatgatcccagttttcctcatttcatgcagtgtgatctgtactggggtttcagtttgcccagaaggctccataatttagtctgaccacacattgtcttattaagcgttataatgaaagaataagcttgggagtcaagtagccccagagggtttgaattctgcctctgcctcttgcaagttacttgacctttacagacatccagttttattaaaaatttgagatagtaatgtctatmttgtaagcatcattgtgagcatgaaatgagattgtgtatataaagtgctgagaatagtactggaaacaaataagctatcaagttgggaaagagggggcattttgttactccatttatctctttcttcaatctctttttttattttaagtaaataaaaaatggagtacatttaaattttttattaagttcttatgttccattattttgtttgtttgtttgtttgagacagagtcttgctctgtcacccaggctggagtgcagtggcaccatcttggttcactgcaacctccgcctcccagaatcaagcaattctcatgcctcagccacctgagtagctgggattacaagtgcgggtcatcacacccagctaatttttaagttttttttagcagagacgggatttcaccatgttggccaggctggtcttgagctcctgatctcaagcaatccaccatccttggcctcccaaagtgctgggattacaggcataaaccaccgtgcccggcctctccaatcttttttgaagagaaccctgagctggaatccattctgggactagtttctgttctttactaatattgtcatattggacaggtaagcgacaacctcttgagtccttggtttcttcatctgtaaatggatttcataatccccaggtcccttttagttctaatgctgggatcctcctaatatgccctagctcccagccttcctctctccttctaagctggccaccttcttgtgttgtctgtgagagtagcatggtgtcaggcaaagagacagaaagacagacagttttaacttctaatcctgtattttgggcaagtcacttaatccctgagtgtcagttttaacatgaacttttttgctttttcttaactactcaactctcccatccctgaggaataggcgtctctcttctctcctattctgcgaatccatcctcctgggctctagccattcatgcctgccttctccaccacctttatcatcagttgtcccccttcccatcatagcgtcccagcttctttttctctgctggctccttctctcaagggtatactgaaatttttcccaccttaagaacacacaaaaaaagaaccttctcccttgatcttcttggtcccctccagctaccatcctattttactctattcctgtcacagccaggcttttgaaaaaacagtgtatattggcatttccattgccttatctcttcaacctaccacaatctgacttttcctcatccctgccttctccattaggtcactaagtgttaaatccaaagggcagttttcacttttcatgcttcttgacctctctgtggtatttaacactgcagaccatgccccctttcctcaaactttacctccttacacttccatcacaccatgttctccaggggctcctgcttttggccatctctttgtggctcctctactagttctttttcctccctgttaaatgttgatgctccccaggaatctgtggtggctctcttcttttagcagtattccagattccctgggcaatctcatccattcccatggctgatggttctcaaatgtcttcaggtagtcctcctacctgagctccaaactcaaaagggccaaccaccctgtggacattttcacttggatgttcccttgatgcctgaaattttaacaacccctcaaatggaattcattgtctctgccctgctttttattctattgtctttgtatgtttggcaacatcaccactggtcaatcaaataagccagacacctggaccatcttacctcctaaatatttcttgaaactatccatgcatttccttctgtactgcctctgccctaacccaagctcatcctctcttacctggttccaaaataattttttttctagtaagccaatataatcatttcacttctctgctctggctaaaatctcatcttcttactttcccacataaagtgctttataacccggttccacctatactgtctccatcttttgcccagcctagtctatagccatactgaatgactgacctctccctgaatctgacacgctctttcaagccttcaatacctttggatatgctatttcctctgcctggaatgcaytcactctcttggcaaatgccttttcacccttcaagtctcagtttgtgttccctcctctgtgaagtttcctctgatgccactgggccaatgtagaggttcccactttgaacattctgattgcattttgaacataccttcatgataacaatgattacattgtactctaattgtctgaacatctgtctcccaattagactgtaatctccttgagggcagagatttcatctttccatctttgcatcccctggatgtagagtatactaatcaggctctggatcaaatgaataaatatgaatgagttcctctccccacaggtggcttctgattttrcacacaagggggagctatgctcccttattgccctgtgctaataattcaatattaactgagtgtcaccaatacagagctaaggactgggcacaaagggatttgaytaaccctgtcaacttttagtaatttctcaaaattttcagaaagcctcttccaatagttagagtctccaagactaacaaagacccaaacatgaattttcatgtttaattgaatcagaaacatacatctcaatcttagctgaaatgagtaactaagaattcgtgtattaaattattttataaaatatgtgatagtggtatttattttaaagcagatgtttactgacgtaagaattctttatttatgacatgtagactgaagctattatatttttaaataaaagttcataggaggaaggtctataaaatgtaaaatatcttggctaataagatagaagataaagcgaggctaacagcaagaacacatgtgatacgctggagttcaaaaaggagtatttttaatatatgtgaataagagataatataatgtattttggtcagggttaaatattattcctgcatttattttaaagggaggttataaaaaaatttacaagaatgtttcatttctattaacatgtgcttaaaagaaacactaacaaaaggcttttcgtattttaagtatagaacaatgttaayttatttccagttctccaaaatgtcatatttattaaagatgacaraagcaaaaaaacagttggtaaatgaaatttgcctttcttaatttcttcttgttccatttcataacttaggtcttcctttatttgcattgcctaatttaaagttaatttttcatgaccctgaccctaattttgttttcattattaagctaacagggctcatgcatgaagaggtgggacagaaatgagaagaccccacaccccacagtcctgcttttcctacaacgcttgtgtttccctggggaacatctttctttctggctcgtcaagtaacatctgacagtaaaattagttttaatgtgagaaaatctcatatcaatattaacttgacccactcctcccctacctcatcaccatgactaggatgtatgcacagtgtacattgatataaataagcagacacaagatacagtcaaatatgcacctacaaatttagataaacagagacacagacgcaagaaccacccagactgtcattctcagtaatatagacttcatcccaggcccctgtgacaaaattgggatgctttctcatggggtggggggagtttcccacactttagggtcctcctttctcacctggcctagggaggaggaggcagcatcctccctttccaggctcccttatgtactgaagactttccttatgctcaatcttattatagacacaattacccaatccttacctaccacaggttgaagtggagttcctatgtgtgtatgagaggtgggtaaaacataaagttacaatctttaagaaaattcagcctagaacaacctccagccttcttcattcaaagttatgtgctaacgtcttgtggcctctcttgtagcctgacaggacttttttcctgaagtcttcccccttgcccacctcccccatctgctggaaactatagagtaagggccactaattctccacaagtggggagtgggtgacatggctggagttgccaagacctctgattggtaatgcacagctactgcaatgtgatgcttttttctctgattggggtagaccccattaaacgtttacagctgtggctagctaaggggmccctgtcaggaactcctgtgctagactttcctcttcaaggaaggggtctgtgtgtacgtgtgtatctgtgtatgaatgtatatgtgtgttgttgcacaaaaataggagttaagtggagaaattgaacaagatctgaaaagtggattggaggcaggattccccagtaagggctgatgtggataaggaattcaagggtgcagaatcatgcaagccaaagtatccagactcgagttaaactgggatggcgattcgatgtctataaaccttgtggcatttatggccttaagaggttttccttgcctccccagtttcttaccaaactctctctttgaagaactcccacttgatccgaacttggtctggatgaaagcaggaagtgcagccctaggtgccagggcgggagcaagcacttcaagaccccctccaaaatcacctggaccgcacagatctaagcagccgcatcccccaccacccacacccggaccactattccctaccttcccctcttccaaacagtgcgtgtgtggcagcctgcgcctctcgccttcccccgtggaacctcacacgaagcgcccccgggggtgtgattaaagagggaaccaggtcccgacgttctgtgaacaaacgcgcgcccttactctcagtggggctcccgtccgacccccactcctctcctaactcacgtaaggacccggctgtgaccggacaaaccgggtctggggtgcttccagtcactcttcaagtcactcccaaacttctcagactgcacccgaggctctgcggcgccgcctccctctcccggcctggtacagagaagggctgggtgcgccaggacagtagtaccggggtctgccagctccgcagaggtccctccaatcccccctcctcctctgcgcccccccacccatgcccagcaatcccagcagctccagcgcaaacctagcgacgcagttccgggtctggcggggcgcgggcgcggctcgcagggcggtgggacccccaagacctcacgaggatccccggagggagacgtgactccrgggtcttagaggggtttaggtcggatgggtgacttgctttgacgcctggcctggtctgtgggtggcaggtgatcgatggccttggacttggagcccagacccgacggtgtcgagaggatctgaggagagtctcccctccccataccctctccgcctcccaccctctccccagccccatgggacttgtgaaggcggacttgcttttttcgccgtccacacaaccgcactagccgggccttcggcaccgacggaacatctctacctgcgccccgggagccctcgccgtctcacctcgcgcgctgccgtccgctggaagcacctccgcgcctccccaggcgccagactccatcccgccccactgcgccccgccccgtggctgagccgagccgggccgtgccttcccctcctcacccccagccccgcccgtcccggcgcagagctgcagaggcaccggacgagagagggctccgcgggcccagctggcagccaggccggagacaagttgcagtcccgggctctggtgacgccgtggccgcaggtcagatttgggagggcttttcccggcccgcgggcctgggcgctccgggggagggagctccaagggcagggtggcgggggagccgcagctcctccacgttatggaagaaaggggaatgctagccccctgcgcctccgatcttatcctaaggctaaaaccggtcctgttagggcctgtcctctgcccaatcaaggttttgagagactgggttctttgggacctgggaatgttgggtggcctagtttgcctgggcctgcgggttcttctcctggcaccagcacaacataccagggagggagctttgggctttaggatccaagctttccccctcagccctcccttaggaccaagatggccttgacccatcttcctcccacctcagggccaccagggtcaccactctagggcttcaggctggaaaagcagccatgtggggcaagaacaggcaggcctgtgttctctctctggttctgccgctggctctgcctggggcttcactgccctgtcctgggcaaccttcctgtcaaggttgttgagaagttactgccccatcgttgtgtaaatcattaagggcaacccacccacaaggagtggttattaagcatgtccaccttcctcttcaggtcatccccacacagcctggtctgaaagcccatttcatgcccttaggggctgagtggtacattagcgttgaggcccaggatcctgaagacatggtggtggcgggggaggggaatgacatcttgggatcagggaaggaccgctgtggctacttccgtatatccagctttacagcttcaaccatccagagcccagctcttcatgcactattaaaggccagcacctggacagactctgtgaaatgcagcaggtgatactgagctttccagttatggcagggcctaggttttttcatttaataggagatggagtagggatgaggtcactccctgggttctctcctctagacaacccatccaggaaccctgatgtttggctggggatgaggctttccctgagctcctttcttcctctatcctaaccccaatctccaggttgccttcaggaggtcttcgccggctttaggtactccttactcgcactcaggagtcccagcctgagtcctctgctgcctctgtttccctgttgactctgggtggagagagagagagcaggaagcttgcactaaatacatgagcacctggtagtgcatcccttctggatccaaccagaggagacaagctcccgcctaccctctctatatcacatttgcccaacacctgtcacttgctttgaattaaacctccttctcacatttgattctggcaaccatgcttagaagtaaacagttcaggcatatttgctcccatagctggaagaggaaaacaaggatcagattggagaagtgatttatctaagatcccacagtggactgggagcagcactgagacctcagcctagtctcctgatccccaagcagggccctgcctaaggaacacactctgcagagtgctgggccaaagcagggttttccaactaatcttagaaggtaaagtccatgaaggtatgtaccagggatttctgtttgttttgttcgtcacttaatctccagtgtctatgtcagtggctggtatgtagtggtgctcatgaagtatttgccgaatcaattaaagaattttcggaaagagtgagtctcttgaactttgctacctactgtgaccttggcccagccccaggccttgattcacagaggcctgcagagtctttcacctgattcttctgagtagctggggctcattctttgcctgtctttttctagggtctccattttgggacattctaatccctgagcccctattattttcatcatgggcttctgcctggctctagcatggacacttctggttggggcatggacccctctgggtgagtacagattggaggagaagcatggttaggagcagaggaacccagcatcctctgggctccgccaaggacaggatccatttgatattcatctgtatctttagtctctagctgacacagtgccctgcacatgagagttgctcatttctagctgttgaagaaatagatggataatggaatgaaaattatccccaaatacacagaattagggagccttcagctgctgtcagcactttctcttttattcttacagtttgggggccctttctctctcctctctcttctcttgttttccataaagtgagggcctctgactcaaaataggaaaagattgattagacacataagacaataaaggatcttggggtcagattggacccaaagctgaaggggagtcatcaatatgtttaaacattatgatgaaaaacaaaagcaatatcttccataagagtttcatgttgctgccttcagtagacagtttcttgctggaatctgaggctgctctctgcagtccggatctctgtggagggaagtgggcctacagtgccacagttaaagttaaaagatcaagtccctgatcactggggatgggagatgcaaaagcagaaagcagagaaaacctgtagaaggatctgtcctggctggaggtgacaggatggtgacaccttccctacaacttctcccttgccagagctgctcacatccacgttccttccagccctcttctttccctagctttggatttcccttttttccctcagctctcacctcttatccccaagaggcgctttccctgtactgtcctgcaaaggctctctcctttatgtgccacgggttcattttattttagagatcacatgtgtggccctgcccaaagtcttgaacccttagctgggttctttgctcaaacatcaggccctgagtcattttcccccctgactctctgctgagtgagtgtgaatgtgtgcgtctgttctctgaagtgagcagagaagaagccccaggcctatagactcctagtttgggggaaagaatcaggccagctatctgctctactgatcagaaagatccctgctccatccctgattccattatccattctggatcttccctctgtccctcattcctcagttctttccccagcagctgagtgctccctcctggaccctcattttggagaatacaacaggatcaagaggaggaattgtatgggggacaagatgccccagaaaaagggcaaagtcatccacatcaccagtccagtccctggtcctacccaagaaactggggaaaaaagcagtagcaacaccacacccttgccctgggctctgctcagccagagatgactagtcccctcaccacaccgaccctgcccagggatgggtcacagaatgacatgtccttctccggtatggagtgtggctggctcttgctctgtgtggtgtcttagggctggggatggattctgtcctgttgtgtcccctcagggagctgaagtttaaggggagtaaagtcccctgcatcctattccccatcaccactgctctcctccagccccctctccctctctgaggccgtctgtcagcacactctgctccctgctccactgctttttggctccctgccatgtctcccccactgaacagcttaaagatctggcttgagtttggacactactttgccctggtttttccctctgcaccctacctctcacatccacttcaggtatccactttctgctgctccaagtgccaggctcacagcacccatatccggcaggcctgcctgtcctctcacgcactgacttgcccagctgccccttccctccattctcacacaggagctcagaaccccatttcgtgggaggtgcagcgatttgatgggtggtacaacaacctcatggagcacagatggggcagcaaaggtaagtgagagccaagtggggatagaaccccagggccaggggggtactgagtgctgcggggcaagagctggcaagtaccagcaaaggccatccatttccaaggttttaggatccatgacatggaggaaagcctgggagagagggggtcaagaatgccccctgaagattcatccttatccttacccctcctaccccaggctcccggctgcagcgcctggtcccagccagctatgcagatggcgtgtaccagcccttgggagaaccccacctgcccaacccccgagaccttagcaacaccatctcaaggggccctgcagggctggcctccctgagaaaccgcacagtgttgggggtcttctttggtgagaacttcaacctctggggaaggaagccggtggggtcggctggacacctctgcatgtgaagaggggtcagaggatgagagagaagtgatggaaggcctaagggatgagggtgagaggtggaggaggcagtggggtatggtaggggtagaagcaggtggagagaggatccatgctgaagtgaactctggttggggaggcagaaatctgccccacacagaaagatgaggggtggggttagggaaaaggggcatccctcctcgttgggttgttggtgggggtaaggggctggtagaggcagaaacatgaaaataatctgggagggcctctccgtgggaccctgttcttaggcattgccccatggcttctaggacaggctcagggcagggttctgattctggcagagtggactgaggggaagtcaaagtgggggtgctaggatggcttgaccccagtgacaggattggtggctggtccatcaggaatgcctggctcctgctgcgttttggagctggtgctgccggcccgtttgcctaggcacactcacagggcacctcccagttaccaaggagaaagccaaactgtcaacgacaacagcttggatcaggtgtaggcacagagggacagaagagacaaacaactgggagggagtgcctaaggtcagggcttggacttgcccataatggctgctgagtcttttgaagcttcaggggagggaaggaaactggatacctagggtaagaaggaaagtggccctctgcttgccctagcaccccctcctgcactgcccgcaggctatcacgtgctttcagacctggtgagcgtggaaactcccggctgccccgccgagttcctcaacattcgcatcccgcccggagaccccatgttcgaccccgaccagcgcggggacgtggtgctgcccttccagagaagccgctgggaccccgagaccggacggagtcccagcaatccccgggacccggtgaggcggggaaggcggcgggaagggaccgcaccccagccaggtgggacctgggcttcgggcctggcagggcctggaggggagaggcgcccactccccagccgcggacacccgccgggccccggccttccctagctcgccgccgcccatcgacccgggctcacccgccgcgtgccccgcaggccaaccaggtgacgggctggctggacggcagcgccatctatggttcctcgcattcctggagcgacgcgctgcggagcttctccaggggacagctggcgtcggggcccgaccccgcttttccccgagactcgcagaaccccctgctcatgtgggcggcgcccgaccccgccaccgggcagaacgggccccgggggctgtacggtgaggccannnnnnnnnnnnnnnnnnnnnnnnnnnnnnnnnnnnnnnnnnnnnnnnnnnnnnnnnnnnnnnnnnnnnnnnnnnnnnnnnnnnnnnnnnnnnnnnnnnnnnnnnnnnnnnnnnnnnnnnnnnnnnnnnnnnnnnnnnnnnnnnnnnnnnnnnnnnnnnnnnnnnnnnnnnnnnnnnnnnnnnnnnnnnnnnn

SEQ ID NO: 97357 - DNA, 13730 bp, Homo sapiens
tgggcttaaaaagatactgataaagaatggttaacagtattggaaatatgtttctgtcaagtgaaaaagtggactctagtatatatattagtgacataaaatgttcaaatatggtattgactggatgtctgtgtcctcccaaaattcctaagctaaaactctaatccccaatgtgatgatatttggagatggagcctttagaaggtgattaggtcatgagggtagactctcacgataggattagtgcccttggaaaaaaagacaggggagggcttgcttctttgtgtctctcccaccttccccaccccaccccaccccaccaccccatccccacacaaagtagacagtgcataaatatttcctaaatgaatagccagtgcttaaaaagcactggttgaatggatgaatggtgcttaaataaaagattctaagtaataacactgtaacaagtatacaacataccctctacaaatgacagttcccttcgcctttcacaaaatttaatgccctcattctaggattttccagtccttaattttgaccattacaatcttttggccattttattatatctcattaagtctaattcacatctaatcatactattaaatgcttattttatcctttgctctcactttcatgcaaatttgttggtaaatgagtatagaaaattttataaatgaaaataaaatggaataccttcttactggtcataggatggtctaagtgaagagtgcttgttcataccacgtaactctcctgaaaatcaatatgaacctacctccaagaccaaggtctttgagaacatgataaccacccggctgcaggaattctccaactattctgtcaggctcttttaagtctctctcaatgactgtcacctttcttccatctctggaaagcacagctgccaaagcagagccaagcacgccagctcccacgatgataacttctgggtcattctgagaagatgttgatgtacaggcagctgttcctattaagcttgtttctgaaatattggttccttttctgcgctgtttaaaaaaaaaaaaaggtaaactaggtatccaaatttgttagattcaaatcatgctaccgctatgtggacacactggacttttgcatcctaggctaaagctagatactaaatattatcaaaccaaacaaattgttacattttaaaatctagataatatataaaaatcaatgatatcaaaatattcgttaaataaaagtgtgtcatattatcccaataaaattaaatatttattgttttctaaacatgatatttggaaaatgttatacagacatatttagaaatccacactgggccgaatataataaatgtttataaggggcttcaaagacttattatagggcaaactgtatcattaataactaaattcttcaaatatatcctgggaatcgacaagatgcaaatcacttacaacttctgatttgagttcatgttacaaactattcggcaccttttagacattttcttttttttgtttgtttttttgtttgtttgtttgagactgagtttcactcttgttgcccaggctggagtgcaatggcgcaatctcggatcactgcaacgtccgcctcctggattcaagcaattctctggcctcagcctcccgagtggctgggattataggcatgtgcaaccatgcccggctaattttgtatttttagtagagactgggcttctccatgttggtcaggctggtcttgaactcccgacctcaggtgatcctcctgcctcagcctcccaaagtgctgggattacaggcgtgagccactgcgtgcggccttagatattttcattattcatctttattttctctttctggattttcatttgaaaaatctatgttaatttaatatcacttttatatgacaaaaggattgtcaaatcctgcctaccaatctattaattgaagattatctaaataaacaaaattacaagagaagaaataactcataccgactcttagatttgacttgtttacaattttggtccttaacatataagcacatatttaatttatccctcctttttccccatcctgatactctaagagatcctagtcaaagaggtggtccccaaaaaaggaacaaggaaaaacattaaacctgtcactggctgaactgacagcaaaactttaactttgatcataaaaagatgcaaagtcttgttttgagagatttatgaccactaagaacaacagtgcacagtggctttttaaaatgaacaattcaattttgtagtatttcttcttggtagatggattcacacatttgaatacatttcagatacagaattgcaaggaaccaccttccttgagttctttgaccttaatgattaagataagactaaatgccatttgaaggggtttttaaaaaataagcaaaaaggaagacgaagcctaaaatcctttagaactttactctgtgattctaatatccacccagcattcttttacctctatagtggactgggaatttgtctattctttttttttttttaatttctctcagaaaaatacttttctgtccttttactatgggaagatctcaatattctactcttcccattagtatgtcttaatggccagaactgactatatttaaattactgtagggggcaagacaagccccttttgtcatcttaaccaaaaatgtgcttcttcataagtttttcctgttttatacacacacacacacacacacacacacacacacaccctgaaaggagagctctggaggaaaacaggccttgcagagcctgatcagtagagtaagcactaatgggaacttagtagtcaatagatcacaatctaacaactccctggttcacaaaaaaataaagagaaagcctggggcgttcacaaaatggaaccaatattgattgctggtaacccaattttcctactccaaaatttctctacacagcatgaaaacaggaacagcattccagccacctgaactagagctcagtgaccttaagggaaattatttcagaccacaatacaaaagagttcaaattaaacattaaggattctctctccctcctttcccattcctcaaacccatgcaccatgtcactgaactcagcgctactcataaagctcatcctaagaaatgtatattacccctaggctaatattaacagctactattatcaggcggttatagactaggtattaactaccagcaagggtggtgccattcccgtctaatggaagaggtaacagattctcacagaaattaagcaatttgccaaagatctcacatccagaaacggtggcgcaaaaatttaaaaagcaagtgggcgtttactgctatagtctcttgcctgatagccctgcttccattcttgtacgcctacaacccattctccatacagcaactgcaatgttctttttaaaaggtaaaagtcaggccaggcgccgtggctcacgtctgtaatctcagcactttgggaggctgaggcaggcggatcacttaaggtcaggagttcgagaccagcctggccaacatggtgaaaccctgtctccacaaaaatacaaaaaaaaaaaattagccaggagtggtggcgtgcacctgtaatcccagctccttgggaagctgagtgaggcacgagaatcgcttgaaccagggaggcggaggttgcagtgagccgagatcacgccactgcattccagcccgggcgacagagcgagactttgtctcaaaaaacaaaaattttttaaaaagtaaacaccgaataaagttactcccatacttaaaatcctccagtgttcttgggagaactcttgggaaaaagcccgaacactcattgccaacatgccctaaatgatctggcctaaactcttccccctcatcttctcccagtggccgcctctgctccctttgcaggaatcccaactacacccttatttgaagacctggcctttatgttaggacattactacaagcatttactcaatgctccaatattcgggggaggagaactttgagcccaatgcctcaaaatgttgagcattctccttctgcctgcttttcaaactgttctgtcactttccccagtcagctgtcacttcttacaagcagtggacttacccgcagcacgtttctttcttcctcaggcacaaatccaatccttacccaagaactttttaaaaactttttcatcatggaaagtggttgttcttctccttcaaaatgaaattctaacatttcgttccatctttcataatcaaatatccaacctccatctgaggctcaaccaatgctaaatgaaacaaatgtcttcactcattcttaagaaggtcaaagatgtaaccaaggcacagcagagtttaaaataaaaaatacatgagaatgtatacaagcatctaacctgccgccttttgcaattcaaataaaacttatatttgagtgaacccaatcctactcctaaataagacattcatctgcccgctttgaaatcaacctaccctcctggcctcgagctgctccttattttctgattcagggggggatttggcccagaagaagccaatgaaaggcaggcctgagagaatatccgagaagagggcgaactgggagccgctctgctggcgcccgaggagacccccgtttcggtggcgacagcggtaggagagcaccaggcccagcgagaggaacaccagcacgcacaacaggacctccctgttggccaaagtgatgaagtccccgaacttcttataaaaataggtgaaagtggcaatgcccagaaaagtccacatggttccaaggcttctttggtggcaccggtcaaggcggagattatctgctcgagtgggtttaaggttctccccaaaatgaggtaccaagaggagcacggagagccggccagactccagtaaacagtgtcccaggacgagaagtccgatcagaccagtttttaaaaatcatataaagttagtgtaaaagtatgtgaagccaagttgtatagggcgtagaaagcagtatttaaaaatcgcctgctggaacagctcccgagcagactcgctcctcctcgcccaggaaatccagatattccctttttttcttttttgatggtgttccctgagcggttgctgcgggtgatggatactcttctgatactggctcttcgtgctataatttcttttctcaccaagagcaggtgccctttcagaagggaatgggagtggagggagggtcacagaaacacctcggcactgggggaaacgtggcctagcctctggcgacggcgagcagcggccggaaggcacgggggctgcgggccggcgcgggttcagaggcttctttttccgcggacggagacactgtacagcccaacctcgggaaaacgccaacgccgacgccttctccaacaaaagatggcctcggactcaagagtgcggctccagggcaatgcagccccaacctaaagatttagaggcctcccgtttcgctggcccccagagccgcccaccgcgactgcacttccccaccgataaaaggtggtttccagggtacctccctcagatggcggcggcggctcccgacggcttcctcaccagcatccctcgcgggcggcggctctcgccagcgcggcgcggccccagtaaccagagtaaccgtcgcacgcccccactcgccgccaggctccacgcgtctcagccagctgggcgggctcggcccagacgagggaccgggggcggggctcaggcgcgagtccgcccataccgcgcgccccgcgtgctgccccgccccctacccctgctcctgccgccgccggccaatgagggcgcgcaccgcgcggtaggccgagatggcgctatgccgcgtttggccaatcggaggcggcgcaacctgcgcggcgacgccccgaaaggcgctagggcgatgttgcgtggtgcgggttggggcgtggggatgggcgcgggccggctccggcgtgggtggggccaggggtcgcctaggaggcgctctggggccgggatcggcgtcggggtcggggttggggttggttcaccgcagcagccccagctcctgcgccctccctggactgaggtgtgctcgctttgaggagaagcctggagtgatccgctgcctcgggtcggaacgtttccattcattccgctagcatttattgagcgcttatgatatgtcagtccccggagtccgaaasaggaatcagacacagcttccctgccctgtgtatgtggagaggkcggaagggagggccatgagtgcgtggagagcctgacattccagctgaagctggaagaatgagtaggcttttgccttaagaagaaaaggagaggacgctccaggtgctcaggctagagatacacggatgcgcccagcccgttctctcaagaccagaaacgttgggggtgggggctcggaggcaaagaagtcaaatagtcgtgtcataggtgtcctgagaagggggtggttagagagggagccatggaaacccaagaggtggtccttcccttggcctggagaagtctggtgaggcgcccagggggaggttacacggtgtccaggacaagcagtccgagggagcaaaagtgtgcaaaagtctyggagtgagacagcccttattctactacgatgaaacttacctaaaatttattgaggcttaagacctcagtgtctttgctcatcctgtttcttaactctggacttccttctttaacccctatgataataggtgcaaatcccttctgccttttggagcgtggctgcattgtcacctcttccaccaaatcgccattgaccttcaccaagtcacataactttattcatactttttaatctctagattccctaaagatctgtgtctgataagatcacccacagcacctagcacaatgctctgcccttaatttatcctccataacatgtatttaatgaatgatgaacgacactggcgcataaaagcaagactaggcaactagagttaggagacccagattctggctaccgctaaccagactgtgaccttttacagatgttacaagtcactctgcctctgtggggagaaggcaacttcttcatgaactcgaacatcctttgcaattctgtatcagatacttggcagggtttaaaaaaacatggcacctcttataacttttcacccccaatattatgttttatctgctaataaaataattatttggtaaaacacccgcacaggcgttcacttgaccctcaaaacaactttgatttttaaaatgaggaaaatgaaaattaaagaggttaaatggcttgactaaatcacagctgtgattaaatcgtaatgatgaaaccaaaagtcaaagtcctggtctccaaatcttgtggttccccagtatgcataattatcaataactgccttgctttccaatactttyattctttcttctacaatattcctcactgttaccagtaagtttggctgtctgaactgacatcaaatttaaaaggactgcagaaaagagaatcagttcaatgtatgggaaatcatttcctgaagagaattcttcaataaactgcttattggtatctgtgagttctgttttgttaaaataatagaggagcagctgactcttttattatttttaaatttttgtgacagagtctcgctctgtggcccaggctggagtgcagtggcgcaatctcagctcactgcaacctctgcctcctagcttcaagcgattctcaagcctcagcctcccgggtagctgggactagaggcacgtgccaccatgccggctaatttttgtatttttagtagagacagtgtttcaccatgttggcgaggctggtctcaaactcctgacctcaagtgatcctcccgcctgagccttccaaagtgctaggattacaggcatgaaccaccaagcccggccaactgactcttacagatgggaatacagttatcaccaggatggctgttacctgctaactctgtactcaagattatcataaaaggaatttttcttattaagtagataattttttaatctctggaaagcgactttcttcatatgtttttatcttcacaaagtcattcttacaatgtcaggtctgaatcctttaggcagttcaagatccacttctgaatttggggcaaaaagagcacttgtaatacctaccgcagagcacactctgaatgcctatatcttctgaactgaattaaatgttatataagcattgcttaagtatttttgaatcttgccatggttcatttattcaaaaacaaatctgtcattgagacctgaagggaaagcaatgaaatgtgagacaaaatcagctgcttactggcagaaagccataatgctatcaagtaggtacatgagaaatactttcgtacaagagctcacacatatagtacgggtagcattctaaatacttttcatatattagctcgttttggcttcctgacaacacttttagggagatactactttttttttttttttttttttttggagatggagtctcgctctttcacccaggctggaatgccgtggcctgatctcggctcactgcaacctccgcctcccggggatcaagcgattctcctgcctcagcctcccgagtagctgggactacaggcgcaggctgctacgcccggctaatttttgtattttagtagagatggggtttcactgtgttggccaggctggtctccaactcctgagctgaggcaatccgcccgcctcggcctccccaagtgccaggattacaggcgtgagccaccacacccagctaagatactatttttttagccccattttacagacaagaaaactcatgcacagggaagtgatcacagctagtgactagcagagtctgaatccaagcccagaaaatgtatgtgaggaatttaggaatgtgtgacttgatttttctccccacacaaagacctagttatcttgaaacaaacaagcacatctgatctcttttttgcttaagcttttgagttttcactgttagcctagtttggcacaccaggctagatttgtgttttaagtgccattctcaatgcaagaaaaagtcccgcccagctttcctcaactacccatgctttgagacctcagattaatcatcttttttttcctcaagttttcataattccacctctgttgtagcagtcactcaccaatttgtactataattatctactcacaatgccttttccaagttgtcgaaaaagagctcaagagagggttctgagatctcatgcaaaaaggaattcaaggctagtagcagagcgcagtgagaagagagtttattaaaagctactccattacaaagtagggcatccccagagagtaagaggaggcacgtcttgtctgtaagttttccttatacagaggtcttatctatgtaaaaagctaagctgtgtctacatgtcggtgagcagacagcattacaaattattctattgatttaaagataactatccttgacattctagtgtgtgaatacatcaaagcttaactgtaattatcttgaaaacatagattgttatgggtattgggacatgtgggctttctgcttttgtaggagtgtgtccttgtagtaggtatctttaggctgtttcctcaactataaacgtgttatgattatgggttgtgaccgaaaaggaatgtgccttgttagtctcaagatggagttgatttttaaagtggtgccactctggctctcctaggctcctgcttccctaacacaagggattcaactcctcaagacaaggaccatgtcttattcacagttgtatactcagtatttggcatatggtaagcatttcctcaatgtattgaatacaatctttctttttaaaaatgttatcccattgttttggtagcaaacgaaataattgtcttctcaaaattttctttattttttattttttatttttttatttgagacaaggtcttgctctgtcatcccagttggagtgcagtggcacaaacatagctcactgaagccctgacctcccaggctcaagccatcctccaacatcagccttggaagtagctgggaccataggtatgtgccaccacacctggcttatttatttatttttcatagagatggggtcttgctatgttgcccgggctggtctccaactcctggcctcaatcaatcctcccaccttggcctcccaaagtgctgggattacacgggtgagccaccatgcccagcccttcaaaactttatcactcaccatttacctcatccaaagacttttaaccccaatcatgtaattgttggacatcccctcagcacttacataatcttttgcaaattctagttgcaagtgatggagccaacggtattaattcggaacattgttttcattttctttttctcctttatggctcataaaaccatagttagagtgaccatcaatccaatttaatgtaattatgtaagaagtgtctactttgtgtcaggcactgtgtttggtgctgggacgcaggcagtgaataaggcagacatggtacctgtcattttggagtttagaatgtattgagaaaacagcagtgaacaagtaattacagatgtcatgtgtatgaagaaggaggaggaggaggaagagagagaggaagaggaagaaagaaggagaagagcaccaccagcaagcagatgttgctctggagggtaagaagttataaacaaaactaagggtcaagaaaggcctaccagaagatgttacttttaagctaggtttgaagaattagtaggggtaggcaggtataacctctgtcaatgtcagtgatcacaccttacctttcttcttccctttctccttactaaaacattatacagccaacaaaataagcttttcactcttgatggcagtatgattggaaagatgaaggttctattcttctgagcagtcttatttgatatctttctataagtgtccattctgtttttttcctcaatattgttaatttgaaataatatataaaggtcaatctctaagaaagagtttatttgggaaaatgcaggaattgcaattcaggacacccagacctgggcagcacctgggtgtgtccaaagaacgaagggaaaggctgaggttttattgggaaagtgaggaaggtacactgttttgaaagaaagttcattggtgccagcaggaactggcaagttctgcttgatgaagtagcagcagttaccaggtaagacataatcttaaagccacaggtaggtctctgtgggttttttgttgaattgcaaaaatagtttatggaacaggtgtatgggaactgggtgccctttcgtatgacctctggactccattttagttggtaatgacaagactgactccatttgatacactcaactttcacaatgtcaattttaaaaactagaaaatattcatttgctaaatcagagttgaacctaatctcctagatttggagtgcacttcattttctgaactgggtggcaatacatattgaactaggcagcctcttcctcaagcattcttcctcttggcacttcaggctttgagccttggctcatttccctagttcttggagcacatcctagtgatatccactggaattgtgctgagaaaaagaaaaagccagagtaattattaaaatgattcaacgcaaggtgaatctcagctgatcctaagccaaggagaaggggagtgaggaggaggaaaaagattaactaaaaaatctgccttagaaggttttcatcatattgatatattggccatgaattccaataatatgtaatttatttacctattagttgttgttctccccctctccccaaaaggatttaacaaaattacttcactggggtaatttaaattgataaaatttctgaaagtaattaagcaatatgccttgaaaacaatgtataccctttgattcaataatcccacttctaggaattcacctgaatcagtaagggttctccagagagacagaagcaacaggatatatggaagggaatttattagggaaaattggctcacactgccacagagataaagtcccaccataggccacgtgcaggctggagcatcagcaaagccagtagcatggcttagtctggaagcttcagatgatgcagcttgagaacagtttgagaacaaaagcctgacaatcctgggaggaccctggtgcaagtcccagggtccaaaagccaaagaacctggagtctgatgtccaagcgcaggagaagaacaggcatccagatctggaaagcagacagagagcagagaacaagggtctcccatcttccccctttgtcccagctggcccctagctacctggatggtgcctgcccatattgaggacaggtcttcctctctcagtccactgactcttgtatcagtctcctctggaaacaccctcacagacccatccagacataatgtttccctagccatctaggcatcccttaatccagtcaagttgacacctaaaattaaccgtcgcaagtccaccccttgttaaactatcacccatacacatctccttaaaccatacttcatctccaaataaaaacaataaaaaggtcataattccacctaacatgataaaactatcctgtgtacaaccaaaaacgcacaaatcccatccccagaagagaaggtgaacttctttagtgatgtttactcttctcctgatatcccataacttaaatactgtgatgtaaaattaacaatacttaaacactaaaagtcaataaattttatgttaatgctaaatgaataagagaggaaagacaacaaatatctgtgtaagatgtatgtatctatgcatgaaggtattcttaacaaaatagggaggaaatagtcatgacaattacagtcctcaattctgttaactggtcatgtgggtatagctggtatttataactactttcttctatcgtatatgctgtattccatttgccttcaagttcagcaagcacctcagctggttgtggttctctagctggtggggtgacataagccttcattcctaaagggtctgggccattcgtagtcctgcctagattcagttattgtataatagtttcccattgaccttaatcataaggcatggtaaaactaagggacttcctatatttcagacaaactcttccttatctctattgtggagtaatagtccaatttcacccttggtagtacagatcaatcacctcagccaacaccttaactactttcttagcctgtgtggagtccaggttggcccggtggcagttttaaacttccaattcaatgaaatcattgttgtgtctgctggtaaaagtattcctccctctggaactaatgcctctaggccagcagaacatgtcattggaacagaaaacaaacattttgctagtgggtcactaggggcaatggtgagtggtgccactcccattttcaccccttgattgctggatgcatgagtcctggctatgggagaaacagtataatatattggatgctgattcagagcatatacggccttctaaagaaccttgttccagtcctgcaaagtatcgtcacctagctagcactgtaactgtgacttcagaaggtcattctgccattctattaagccagctgcttcaggatgatgggaaacaaggtaaaaccaattaattatatgagcatgcgcccattgccacacttctttggctgtgaagtgagttccttggtcagaagcaatgctgtgtggaataac

SEQ ID NO: 97358 - DNA, 111320 bp, Homo sapiens
  misc_feature (1)...(111320): n = A,T,C or G
catgctcaaagcccttttgttgaaaataatacataaatcatagcagacatttaatgagcagatacattgtgccaggtgtggcttctaaacactttatatggattaattcacttaattcttgtaattaaccaataaggaaggccctacttttatccccgttttacagataaggaaactgaggcactgaaacaaagctgtgtgatcaaaaatcttacccaccactttcttaggatttggctaatctctgagtgctgtggtcttgtgtttgggggttcaggtgttaggtcaagggtatacaatattaattcaaagtgatgtgtgggcacagataaatagctgcttcatgtcagatgccatgtgaagagctaaatatttgctaacccatctaggcaggcaccatgagaacacattgtttaactccacagtagccatgtaaagaaggtattaattttctcattttacagatgaggaaactgaggtccagagagggtaagaactgattcaaggttccacttctagcaagtgagggggcttgattggaaacgaaaaccagctttcgcctagctctgaccatccaattctgggccacttactctctccaaaagttgagacattccctaagcccctcaaaccaagaatttctcagggagccattgtcccacagagtacactaagctgggactccactcattcctaggtagaagggagtcccagggcacatggtctggcccatgcagctcctaaatgggacctagtcccatcctgtcctgcacatccattagtagagtctactttctcctctagggaccagggaagataaagaataaggtagatatggttcaaattatagtatcaagccttgataattgaattaataaaagaaggaaggaaggatagaaagaagaagggagggaaagaagtgaggaagaaataagatcaggcaggtgtggccctaaccagcactgagcaagctgctttctgagctctagttttattatctataagacggagacagtaatagcctctaccccagacatctgaaggatttgatgatgttatgcatatcaagcaggtgctctatgcaaatggacggacggagaggaggcttggtctccttgttggaatgtttctgggaccaattcttaggcctagaagagactacagggagccttttctccattcatatgttggagggccttctgagtgtggcagcctcttagagaacaagaatctacccagagtcctaggtatggggttggctggggtctgctgggacatgttaactgttctactttatgacccagaatgtctaccctaatatgtaaagttctgggttgtgaataacagaccccataggctgaccccaaggcccagaaacagaccactggctctgtggtaaacatagagtaagatacacatattatgatcataggtggcctgttgggatgcctacagaacacatggtgcttctggcactctttgtatcagttaagtttagttctaattttctgcctttgtaattcccttcctccctctcttccttcttccctctctccctccctccctcccttccttccttccttcattccttcattccttccttccttccccttcttcccctccctcccttccttcctccctcccttccttccttttccttccttccttctccttccttccctccttccttccccttccttccttctttctttccttccccttcctttcttccccttactaccttccgtccttccttccccttccttccttccttccccttcctaccttctgtccttccttccccttccttccttctccttccttccttctccttccttccttccctcccctccctttccttccttccctcccctccccttccttccttcctcccctcccctcccttcccttcccttcccttcccttcccttccttccttccttccttccttccttccttccttccttccttccttctccttccttccttcctttgttccttaattccctccctccctccctctttccttctgcagcaaatactgtttgagaaagaactctgcctgctaatagagataacagtgcattctgctacaggattttacaaataagctaggagaaatgcatagagaaggaagagataagggcaaatggaaaatggatagaaggaaaggtgaaaaggaagaaaaggaagagaaagagggagaaagaaatgaggaaggggtgaagatgaaaaagaggcagaggaggggacaggaaagaggactgggaaacagaaaatataaggggagaaggaaaggcagaaaagggaaagaagaagaaaggaaagaagaagaggcagaagaaggaaaacaggcctcttgagtattttctatggcccttcagccagtcttgtttatttggagctggtagagatatatctatgtccaactctcaccaaggggagctcataaataaatacctctgggtaggagcagatatctgtaaacacagctgaggaattgaaagtcaggttcttcaagggtatcgacttgtcaaaatcacaccacagctgcggattaaaaaaaaaaaaaaaagaacaacaaaaacaaaaacaggaacaacaaagtcagtgtgagtgctggaaatggagcagtgtgctatcagtggctgggcttcagcacgagcctgggtagactgaaccctagaggggacttgaagtcagaatggaagtgccaaagtgccagctttgatttcttttatttaaaaaacaagtgcttgctcagaaagaccttttgtaagccagtcatgaaactaagtttagactgctctgttggccccatcatttaaggtcactggagtgtgcttgtggagctcagaagagaaagccagatggcaggagaagaggtcttgggtaaactcatagcctgtctccagatcaacagctgggaggacttgaagaatctgaaggggtacattttccagaaagactcttagcactggggtgatgggcatttcctaggacagaagttgctgcaggagattttgtggtattaggaaaagaataactaccattggccaaatgcctcctctgtgccagacactttgtacaaaaaagcctcacaaccaccttgtgatgtagctgctatttttaatccccattttacaattgaaaaatacgaaactctgagaagtaaagtaacttgtccagtgtcactgagctggtgactggtggatctgagatttgaacacaggtctatctgactccaaagcctctgatcttcctaccacactactcactgaggcacagttggcctcagaggtaaccctgacctacagtcattgggcttacttacaaattctgcaccccagaaatatctaatttgttatcaagacttaatttaaggtcctggctgcttctctgcagcctgtgatcaattgatcccatgtacttccatttcagttatcataatctataaaatattcattagatgatgaactaaattagatgataattttccttttcctcttttcctttatccacagagccttcactagaaggacaaccacagaacttaagtaaggtaattactgggccaaattggacagtgatttcaggcagtctagggctccaagtcacaggccaacaattgtgggagtctatagcttgggtccctgcacacttggggaccctccttcaggcccaaagggcacagtgatggattcaaccacatgacaatgcctcaactagcctctctcaacaagccaagtttaagacctggaaccaaacaaatcacctcaaaaatctagctgcctgagtcatggacaacacagactacttgtaaaagcacagaaaatacctatagctaccatggtacaattcttgagaaaaaatgaaaccatgacaatgtgggtcagcaaattaaacagtgataaatatcatggcagttggaaattcatctgagttctatgtgtcacgtgaaatacaaacttttagaaagtataggtgagatactcagctttcctgaaatgcagtttcctcatccattaaatggggacaataatacctacctgtagcacatagtaggtgctcaataaatggcagctatttcatttccatttcccccaccccactcccactcccagagatacaatttagcatattagaggggcgtgggtcatggagtcagacagaccttattatcaagttatttcatgtctctgagcctcagtttcctcagccataaagtggggataattaaacttacctcacggggtttatgtgaggattaaatatgaaaaatatgtaaaggtcctccttcagtgcatggcacatagcaggtaggtactggtacttgatacatggtaactcttatttatgatgtaattggctactgacaatatggaaattgaagggcttttggaactcctttggagaaaataacctatcccactgggaaatagacagttttccaacagtaaaatgcacagttttggcagtagccacatctttgttatctgtccctaagcttggggctggaccaggcacataaaggtaactggtaccaaggaagggtaatgcaggaagctgcaggctccataaacttcatgctcaactgcacactagacaccagagggttggtggatgtgggatgcttacgatatttaagatggcacccaggaaattaatcaaaatggatgcaaagatgatgacgttccgggccaaataggtctcattaatccaacagcaagttttccggaggatgaggggcaaacatttataatcctctgctgtggtgatgaggaccagagccgagtgcagcataatcagaatggagaactggatggtcattggcatcactctgcagggaaacacagaatgttgggtcattggcatcaattgtctgagcaacactgaaattctattcctggtcttcctttcccatcccttgcatcggatacttctttgaaagttctgtttgtccaagaaaaaggttattagcaggagagatttttaaaaattacatgcatccctagagcactctctctattgagaaactttgcaaaaaaacagaatatttggcttgatttattgctcctgcccattttttccctcctattaatttttgtcactaggcaattgctgtcatggcaacacaccactctagtttgatatcaacactctggctgtgggatgaacccacatacccttttcccttcaaggtgggttttgtgaagatttccccctccacctatcctgataccaagaactggatttggcattggttttaagttgctcaggttggttcctggttttgtggttttcatggactataccataagttatttgagacatgggtaaggagaactcatccttgtccaaggcatcagcatcactctcgagtttacatctcgagtttcaaactctcatcaaaactctgtcccatggtagcctgtgtcagttggacacctgtgctcggtgtcaggatgcttagtcagtctgtgatctaaaactccatctctggaggcatctttaactcctgtctcccctatcaacctatttatcaccatgcaatctgcttctccttgggaattaattctttgttctcaactctgtgtagccattcatgtcctacactggcagctctaatttttccatctctatttcaggcagcaaactgatgcaggtgttaaagggtaccttgatagaagtggagggaaattttatatctgctcctttttctataaattgaggtttattcatctggcattaatatcttccattggccagtgctaaataaatgtgtgttcagcaaataaagttgaactcaccttcttttcctaacaccatctcttactatcctcctccttaaacttcttatgtattattaataacactagtataaataatgtatcgagatctgattatgtgttagccactatgctgagcattttatatataatatctaatttccattccttagaatgaaccaaagaggtctttttatctctttttttccagatgaagattcaaggctcagagggaagaaacttcccaggcatcatacagttggtcagtgttagagccagaatttaaagtccactctgttataccgttctgatattctaatcactttggtgagtaatagatctcccatgtttgcaatcatcttttttgcttttatggtttcatcataatatttatttattcaacaagtcttcttcccaggtatacagtggcaggcatcagggtactggggccaaagacacatcttcctcatctaggtgattataattgagagaggaatataaacatgcaaatgatgaactattatataatattccgggatctataaagagttctaaacaaacatcaactgaaaaataggaaagggaatcaagggaggcttcataaaagaggtgacattgggttaggctgtgaaggttaaagagaaggcttgcaggtaggaaagagtggggagcatgagcaaaacatcagaagaatgggagtgaccagtgtcttcagagtttcccagtaacccaggcagtgtggctgtgctcaggagctttgtcctgtaggcaatgtgcagaaggaagtaatcagatctgcgtgtttgaaagacaactgtggtgggaggtggaggatgaagtgaagaggaaacgtgttcagaagagttaaatagttaaggcatgagttaatgagggaggaacacaggggaacagtatgataattggggggtgcagggaaagatgtggaggtatattaatctgtgttttgtatgtatgtgtagagggtatttgagagagggaagtcattaacgatgacattaatgttttttattgtaactggtaaatgcaggaaaagaagctagtctgtacaggagataagttgataaagttgattttggacacaatgcatgtttggtacttgtagatcattcagttacagatatctagatgtccaggcagtgagggacaattgaggaactctgaggctggagggaataggtggtgattgagatcaaggaatggaagcatttgcccaaggatagtgtgtacagcaagaatcaagaggacccaagatgagctgtgggggatgctaatgggctggaagaagagaagacagcaaagggagtttatgaagtgtggttagataagcaggagagcaggagtgcatggcatcatggcagcaggggggataagaaattcacaaggaaagagtaaccaagaatgtcaatttcctctgcatgatgaggctactttaaggctggaaagtgactcctcccacagcctcagctattgttggtagaggttttttttgtttgtttttgactagcaaagttttgattttatggatcaccttgacaagaaatctctgtaggagttctatataagaacagaaggttggtgcatcagtgagttcccagagggctctaggcagatgggaaacttccctccaaacaggctggaaaaacactccctgacaacacaccattatttstgggcaccagggggagataaatgaaagagaatgcaggcggatcgctttgtcaggaagtcccatgagagagggggccaattgcaaggctcatgtggctcattcacatgaggaaaccaacgagtataaaaatgtctcttttcaaagtgtgagacagaagcaaaccagggaaaggcagctttgaaagacgctgagttggagcctcaaattcttacatggccaccactgcctgtggacctccacatggcatacagggccttgagtgtctgctcttggctctctctcctgccttttttttttcctccctcacccttctgcaccccatggtctggrcaatgctgaactatgtgcagtctgtcgccagtgctatgcactttctgccttatgggcacttaacatggtgtgtcctgttattcctgcaaggctcagctttcctttggattcttccatgacacctggcatagggctgagtatacagaaggtgctcaataagtattcattgacttatgctttttctgggaagagaagactctgctcctcccctcagcagccttcacagggaagaagacttccacctacatgcccagactatctccctgcctgctcactatatctctccaaggaaggaggaagggctaatccagaaactatcgggggtgctcagtggacctcattttccttggagggcagggccattgttaaaggtcagtatatatgcacagttcagacacttatattctcctcctcttcgatccactgagatgacagggaagccagagccttgatctaccctatgggaggagggctggccatctcttctctttggccagggcatctctgcctttaaggaagaaagcccaggttggcttaaccctggctctggccacagatggcaccgtctcaggtctgcctcattcacctttgacactggtggagtgcgttggtttaatcttttgcagcatcatagtggtaggatctcacaccagagtttaactgtgggatatgagggccagcagagaagagattcaggatggaggccatgtggtctcttgacttragccacattctgtattccagcttttatcacagttttgcataggctaaatgggcaattgtttggaaatttgtaaaattgatgtttttttttttctcatttagcgattgaacttatgtgtaatctttggcatggcggggagttcatcagggtatctatagggctgtgtgggaggatttgcacacagaactcacctgagtccctgacccagttttaaatggctttcttctgggtttgctgtaaaagggaaagggaggtgaaagacaggccatgtggtccagtggcaagagcaaagtcttatatgtttgaacctgtagttctgaagcataactagtagtgtggtcatgggcaaggtaattgattcctctgagaattactttttaatctgtaaaacagggattttttaagcctaccttttaaaggaggctctgagattaaacaaagtcataaagtagtataataaaaatttaaagaaatgttagttctctttctctattcatcatgaaattcaggaaaccaaaagcactttaaagttctatggcaagggtattaattacaagattagctttttaagcaaaagtactgacactgtrtattacatttctctggaaatctctgcagcagttcctcagcattcatttatttctttacatgtaaacattataacatcagattgtacattttatctaattatagagccactcaggcatccaggggttctgaatttgcttttgcattgttggtgcacataagaggcaaggaaacctttcatttctgaaatcgagtctcaaaaagaatgactagttttgcaaagctctatccaaatcatttctagacattaagtcctaattattctctgcagtctgtctttaaaatggtttgtattgatattgtgatttgacatttgctgggaaggcaggaatcagtggggatgagtgaacagcctatagcagcttgtggtgcaataggaaacaaaaactcagattatactgaaagatggcacctggacaacactttagaatctacagactctatgggtacaatagtgtctttgatccttgcagcaaccctgaagaaagatattctaagccctttcaacagatgaaaatactgtgactccaaaagggaatttgccagaaataggcttggttaatttaatttttactgcagtcttggcaagtgggcattatcattcccattttacagatgaggaaacagaggtttcagagaggttaaatacatacatataggtagtataatgcacagaaaataataagacccagtgcctgcctctttccctccgtccctccctccctccctccctccctccctccctcccttccttccctccctccctctgtaggtcactacctctctttcttttccctttccctccctccctcccccttttcttttccccctttctgcctccccctctctctttctgtgtctttgtctctttctcatcatcacatgcagaccagatacattgttctatagtcccaagaagtattttctagtctttccttcgtttacccttcttggagaggaacatctgtgggcatgtggaaattaaaggaaagagctgggtaagcactgtctctctctctctctctctttttttttttttccagagtccattaatttttgctttgggggctaagaattagctgtggtcatatgagtagaaactccctcatctgccaaaaaaaatccatgacagaagaaatgcgagtgaaaagcacccaccatctgtttagtttcaaagcatcaaacagaaacaaaatgagttggagagggaaccagcacatattaaagaaagcttttgctgtgtctggggtaaatgggctacccaattcccacagcatatggattgtctggtcagagttcagtttccttccttgtcaggatttttctcctcgctaggtaaggttggggtgtgggctgtatttcagttatgggcttcaccttgaattctagagttggagactccttatgactagctgctgggtgagggtccaggtctcttccccctgaaccccaggaaccagggcatcaaggcttgctcccctcccccaccccgtcacaccacctagaaagaaatccagcccaggcccgctgggaagtgtgaggctcgcttctcgtggaggacagtggccccttctcctgtccagtgccaagtccagatccgcgggctcatcctggtcttctccatctctctcatcccccacatccagccagtcactgtgaaccgtcaactctctgccctaaatatcttaaaaattcttcctctcctgtccacccttctgccactctcttctccttattattttgtgccagattttttatttgcagttgcctcctaattggtcatcccaaatccagatttcactcccacctctccatcatccccgttcagtatgatccttctaaacatgaatctgatcacatcatctctttcattaaaatgctttaatgaagactcctctgccaaccagtcacaacgcctcaatgaacttcacaactcctatccttcagaatgctctatttccagcccttcctccccttaatccttctcagtctttttccatgacctggtgagctcctttaggagccaggtgagctgtcactgtcatctcctctgggaagcctgccccagaggcaaaaggactacttttgcctcaccccaactcccacacatcgaatcccagcttacacctttcctatcacaatagtcatcaccccatatgatagctgttcagctaattgtcttttagccctactagatggtcagctttatgatggcagagaccctgactgtatatccccatcactatccagcacaaactgtcacactgatgtttgttgagtgtttgccaggaatgttaacaccttgagctctaggagtccagaggaagcaacagacacggccgggcccttcttggctaccaccttcccattgacaagagtgactagaggagcccagcaggtttggctgaatcctgccaggccccaccaacactcacagctcgccaccccgaggtgccttcggtcaggaccctagtcctcattgtctcttargtagtcaagaaactcattctttcctggtattctctggtacccttcttctgatttattacttggataacacataactatcgccgtggctggcatattcatatctacatatgtgtctaccttcgtatgctataagtagctacatatatagtatatacacctggacagatacttatatattccttatgtcttagtctccttcctccagattatacattccaggagggcagggattttgttcttgtcatcttttttttttgtcttgagatttattcctagtgtttggaataagtctggaacataataaccaccaatggctgttggtgggaggactcctatcccacatttggcaaaagtcattagtaactttttaaaaatggtaaaacgaagcataaataaagaaaaccacacaaaagtatctcttggttatttgttctgccgtgtgttggtttttcatgaccattaattcctgaaatagaactttgcagtgcacaccaaaagcccatccatttgtggggtgggggatggggggagggatagcattaggagatatacctaatgctaaatgacgagttaatgggtgcagcacaccagcatggcacatgtatacacatgttactaacctgcacattgtgcacatgtaccctaaaacttaaagtataataataaaataaaaataaaaataaaaacaaaagcccatccatgagccctgtcccaatgataatcctctctgtcaacccccattaatcactttccatttccatttctttatagttttatcctttctttatagacactacagtttagtctcatccatttttattaaatctgatttgtcttttaaatcttaaaatctgtaacttgtctctttatccttttatcttccttacaacgtatttatcgaaaaacacatgcctctgacccgtagcatttctcactgtctggattttactggtgtgtacttagtcaacattctctgtcctctataattcctgaaaattggaagctggaatcaaaggcctgaccaaatttaggtttgatcccattggcaagaccataggtggtgtgcgcccccaccaggaggtatggctgtctctcttgtttgtgttgatagcatcctctgatgctcaatttgtagattcattaaatcattatgggttggaatatgatgataytttaattcttttatttctttaaaatgttatagctaggatacttttatgatatttccctcacttactatttagtgatcttatggtgaaaagccactggtttctctcacttttttacaagttttccagataatcaaccatttccctatcatccactaaacactacaaacttaaaaaaatcattacaaactcataaagctaaatatatttgctgggttttgataagtattttaataattatccccattgcagctcaaattattccatctttggacagtgggaacttctataatgtggctcctgcattcttttgatatgatcctaatagtgtttgatggcatccttgctttcttgtaggacaagatgttctaggctcatctagcacatttcctgttccagccctaaaattagccatatctccaaaattgttttttaaaaaacagatatgttacttcaagaccataatctagccctgaggtatgctcatggatgctgagttggtcattctttctaaatctccccataggtgtttctccagtccaggatatcatcttccatttagttgttatgtctcctyaggtgcctccttgctgtgacattttctcagacttcccttgttttacatgactttgacaggtttgaggaatactggtgaggtgttttgtagactgtccctcaattgagatttgtctgaaattttcttcatgattacattacgggtttggggaggaagaccacagaggttatatgccatacttactagatcccattaacataacttatcactgttggtattaatctttatcccctggctgaggtagtgcttgtgaggtttctccatatttgccccctgtacatagtttactctttggaagaaagtcacttttgctgttgcccatacttaaggagtggggaattaaattcctcctcactgaggatgaattatcttcataaaatatgtagactttctctgcatgggagacatatcattaatttatattagtatgaacttgtggatatttattttatattgtggattataaataaatattacattgtttattttgttgctcaatttattccagctttggccctcgggggctcttttgttggttcctgtgtccctttgaaatactcccattatcatgtatatgtgtgtgtgtgtgtgtgtgtgtgtgtgtatgcatgtgtatgtatgtatgttttagcacattcttattttctggccctacaagatcgccaaggctaatcttgtatatttcctgtctcactgttagactcagacagttctccaaggagccctggttccttttattggatatcggcattagaaaccaagatgtgagtggtagatgtgctcattaccactgaggtgtcattgcttccaggccctctccactgacagaggaaggaaatgtatgtatayattctaacctgtgcatataaacatatctataaatattcctacatgtaaccatctctatctatattaagctatacatgagttcatatggatgtctccaactctaatccattaccaccaggatatttctaactttctcccttcatttgcatgtaaacttccattccaacaatgagaaaactgactcccaccatctgccatccacttacacaattgtttagttccagtatacctatataggtgttgcaaattcttaacccatgcctcaatgggaaattcctatatcaactacagcacagtgcttaagtgcagtttctcttgcctttaatcctacagacttctctcattttcaaagctacttagtacaccattttactccccacatccccttcagggaggttgcttcatacacttttaatacagttagattcttttgtcacagtctgattccatcatgggatcccctaaactcctaaataaaatgttttaaagcctgtatatattaaagttcattctctgtgctgtaaagttttataagttttgataaatgcatrgtgtcaggtatataccattacagtatactgaatgcactaccctaaaaaatatgctggacttcatctcttttattctcctttccctcattccccaagctcctctcacctaacgatctatttaccatttctatagttttgtcttttccagaacattatataaatggaataatatatataaagcctttcagacggtttctttcacttaggaatatgcatttaaggttcattgatgtctttgtgtggctgatatcttattccttcttaaaatggaatcttacttcattgtctggatatgccacagagtttttgttgttgttgttgttttctccagcaaatggtattgacagttatttatttatttatatattagtcattgtactaggtatgtagtggtaggtcattgttttaatttaaatttcccttatggccaatgatgttgagcatttttcacatgcctatttggtatctgtatatcttgtttggtgagttgtttgtttaaatcttttgtccatttaaaaaattgggttgttttctagttgttgagttttgggagttctttgaatattttgggtggaaatcttttcccagacacatgttttacaaatattttcttctggtctgtggtttgtgttttcattctcaaacagtgtcttccacagatcagacattttaaatttcagtaaagtctgacttacaatttttttctttcatggatcataattttggtggtgtgtcttaaaactcatcaccaaattcaaaaccaaaattttatttgtgttttcttccagaaattttatagttttgcatttgggtatataaaccattttgtgttaatttttgtgaaggtttaaggtctgtgtataggttcaagtttttgcatatggatacccaatttcttaatttatttttttattttactttaagttctgggacacatttgcagaacgtgcaggtttgttacataggtatacatctgccatggtggtttggagcacctatcaatccatcgtctaggttttaagccctgcatgcattaggtatttgtcctaaagctctcccttcccttgccccccacccccaacaggccccggtgtgtgatgtgtccctccctgtgcccatgtgttctcattgttcaactcccacttatgagtgacaacatgcggtgtttggttttctgttcccgtattagtttgctgagaattgggcatccaattttatcagtaccattagttaaaaagaatatcctttctccatggaattttcttaacatctttgctacaaatcaattgattatatttgtgtggstgtattttggggcttttctttctgttctattgagcgatgtgtttattctttctttagcatcatactgtagctttatagtaagttttgaaatcaggtagtattaatcctctagctttgttgttattcttttatggtattgtgttggctatgctatattctttgtcttttcatacaacctttagcattggtttgttgatattataaaacagcttgctgaagttttgattgacaatgcattgacctatagatcaagttgggaaaaattaacattttaacaatagcaagtcttccaatccatgaacacagaatatctcttcatttatttacatctttgatttatttcatcagtgttttgaagatttcttgtacaaattttgttaaatttatatttaagtatttcatttttggtgctrttgtaaataatattgtttctttaatttcaaatttcaacgttagatggctgatataaaggaaaacaattgacttttgtatattgacattgtattctgtgacttatttgtttattagtcttagaaatgttttggtgggtcctttgggattttctgtatagaaagttatgtcattggtagataaacatagttttatttcttcctttctgatatgtatgccttttatttctttttgttgttttgtttcaatagctaggacttccaacatgatattaaatacaggtggtgagagtgtatttttgttttgtttctgatattggggggaagctgcagtctttttccactaaagatgatgttatctatagcttttttttttgggagatattctttatcaagttgtagaagttcccttctgctgctagttttctgagagtttttaacataaatggacgttgaagtttatccaatgcatttatttggcaattgataagatcatatgattktccttctttaacttactaatatagttaaccactattgtttgattttagaatgttgaataaactttatatacctgggagaagttctgttggagcatggcgtatgcttctttttatacattgttagatttcatttgctaatattttgttgagaggttttatgtttatgtttatgagatattggtcggtagtaactagattttaattttgttaattttctttattgttttcctgttttcagttttattgatttttgccctaattggtagaatttattttctcctttttgttacaagattaaattgctttttgttctgtagtttcccaaggtagaagcttagattgttattaattttagatctcttttcttttataatatatgcatttaatgtaaattttcttctaagcactgctttcatggcatcccacaaatttggtaagttgtgttttcattttcatttagttcaattttgttttgttttgttttgtttttttagaccgagtctcactctcccaggctgaattgcagcggcgcaatcttggctcwctgcaagctccgcctcccaggttcacgccattctcctgcctcagcctcccaagtagttgggactacagacgccggccaccacgcctggctaattttttgtattttttagtagagacggggtttcaccgtgttagccaggatggtctcgatctcctgacctcgtgatctgcccgcctcggcctcccaaagtgctgggattacaggcgtgagccaccgcgcctggcccaaaatatttttaaatgtctcttgaaatctttcactcacgtgtgattgaagagtgtgttatttaatctccaagtgttttgggattttctagctatctttctattattgaattttagtttaactctactatgatctgagaacatactttgtgttatttttcttcttttaaatttatgaaggtgtattatggcccagaatggggtctaccttggttactgttcatgtgagcttgagaagaatctgtattcttccattgggtggaatagtctattaatattgattaggtaaattcaggttatctatatctctaatgatttcctgcctacatgatgtattaattactgacagagggatgttgaagtctccaactataatagtgggtttayttatttttcttttcaattctatctgtttttgccttatgtagtttgacattctcttgttaggcacataaatgttcatattgctcgttcttcttagagaattgattttttaatcactatgtaatttccatttttatctctgataattttccttgttctgagtctatttggtgtgaaattgatatagctacttaagtttttttttcattaatgttagcatggtatatttcttcatttctttaacttatttgagtctatacctatagtgggcttcttgtatacaacatctattggggcctttttttttttatctactctgacaagctgtgctttgtaattggtatcttgagaccattaacatcaaagagtaatatttttgtgcttggtttaacatccatcatctttgtaactatctttttcatccattgcatttattctttgtttgttcaccttgtttaacattctctctgattttgattgagcattttatatgatttaattttattttttcctagcatatcaattatatttctctctttaaaaacgtttttttagtgtttgctcaagagcttaaaatatgcattttaaattaatgtaactcagccttcataccacttcatgtataatgcagttaccttaaaataaagcattaccaattccttccttatgtcccttgtgacattgctattgttcatctcacttttatccatatttataaccaccaaatacattgttaatattgttgctttaaacaaaaaataatgttttagatcaattaagattaagataaaaacattttacttaacttcatttattttttctctgatgctctttctttatggagatccaagtttctaatctacattattttcctgctgtttgaagaaatttttcacatttcttgcagggaatgttggctaaaaatgtagtttttgtttttctgagaaagtattttttctctgcttataaaggatatagaattctaggttgatggtttttcttttaatactttaaatgcttgactccacgctcttcttgcttacatggtttctgacaaaaagtctgatgtaattcttatccttgttcctctacaggtaaggcagtgtccttccttctggtaagatgatgtccttcactgtggtatcctctaagattttccctttgtcttgcattttctgcagtctgaatacaatatctttttttgatgtttatcctggttggttatttttatttaaccaaagtatttaacctttaaaattctgtgtttctgtgattctgtggtttgttgtctattattaattttggaacattcttagccattattactttaaatatttattttgcttagctctcctttcttctccttttggtaatctaattatgtgtatatttcttcttttgaaatcatcccagagttcttggatgctttgacccgtgtcccctgcccaacccccattcacttttgtctttgcatttcagttagggaagtttctattgacctgtcttcaagcctactgattatttccttggcctttctgagcctactattgagcccattgaaggcattcattatttctgttaggtgtttttaaatttttatcctttccttttatttcctttgattttcttagagtttccatctctctgtttatattgcccattttttcttgcacattgcctacttctattagaacctttaatatattaataagttattaaaaattccctgtatgataattttaacactgttatatctgagtttgattctgatgattgctttgcctcttcttttttttggtgtgccttgtaattttctgttgaaaactgttcatattgtatcaggtaatagaaaatgaagtaaatagatattttctgtgaggatttatatcactctggctgggarttaagctatggttaaggtttgctatagttgtatgttccagtagcttcaaattcctctagtgtattagtttcccctcttgatatgggcttccctaagtactcttcctcagaaagaatctgtgtcttgcagttctttcagctgttagtatccgtggttagtatacagggtccttgttggtgtgacattaargtgtggggaagaaggctctgtcaatcttttaaattttctttttgacttaaaaaatgatgttctttctttcactttctatatttcttaagtaatttttgctgcgtttatgtgctgtttgttctcttttgctgtcttcatttctgaaatatatatattttaaaatttttatttatttcttgagctgtctttccaaatttctaagtttttctaattttggttaggttgttatttcatgtcttgaacaacattaagtgcttcagcttcttttaaaagaataggttaaagttttgatatattttgtgagcatgtctttctggagcactttcaatgactataagaagattattctacttgttattctcttattttttataatagtatagtattgccatcaatatattttgttgctcatttttgtgtaaaacacttccctgaacttttagaaagagcatggttcagagttctagaaagagcatgggttgtttatttatttttttaactctatagagctttctctttggttgctttcatgcagtgtttcaaaacatsatagctmgaattccttcccactttaacctgtatagcccttattgtaagtgattttgatttcactcacacagttcctttcaggcctttatcatgagagggagattagatgatcagtttcacgagttcatagtgtcttgatggttccagctcttcatgcctttcaaaaggttattggattgggcaaactccttcccactttcatttgctttcttaatttggctcacagcacttctcagtgcatatctgttggctgtattgagatccttttgttccccggtgtgacatgcccagtacttctttstgctttctcccatacaggtactgatatcacacagattttggggctattgggggattgttgctacccacttctatattggaatgtatgggtctatcacccttgtttattataaatatagtccatgaggtttttggttttgctatctagttggtcagattcgtaagaattctgagagattaagaaatataccatctgtcccatcatcttcccggaatcccctctctctttctaatgtcctctgctaattagggggaaggtcaagcatggcctgcccttgcatattagttaacttgaacatctttcttccacagcatcatgctacaatcttcctaaaaatctcctggggccccttctcaccctcagaatcaattccaaagtctttaacatagttatgaacattgaacttctgctggttctcttctttttcagccatagtgtctactatattcttgcacaagccctttgctattggctcttacatttaatcactattctataaacacaaggcctttctcacttgtatggccttgccagagcagttttccaaatggaatactctcctactttttcctctctcatcttagtgaaatcaaaaccttttctgcaaatttttccttgagtcatgtggtcagaatgaatcactaattttgatgcaaagcagtctagtaactaaaagcacagacttggtctctgggttcaaatttcagctcrgatattacacagacatgtgacctgggataaatcctcatctacgaatgggaattggaatgctgcctcactcatcagttatttttgaggctttttgagacaatccatggaaaagatgtagtactttcctggcatgtataagtgctcagtaactgggagccattgttaatgtctttgtcacctactaaattatgtcttagaggttacagaacctcttcttccaaaactgtgtcatcctcaggggctataatgttccttagcctatattaagtatttaaaaaatatttgttgatattatttttaatcatgtgaaaggggaaaactcatagtaagtatagggagaaggcaatttagctgagaaaagaggcaggagctagcttatagtttagaggagagraaaaagcatagctattggactaatccagaactaggttcaaatcctggctagagcatctataacctggacaatatgtgtttaatagagggttaagaacccagactctagagctagtcttcctgggttgaatctaggcagtaacatcttgaactatgggatcttagggaatttatttaactattatgagcctcagttccctcctctttaaaatgaggataatcatggcacctacctcataaggttgtcatggggattccagaagtttttgtaygtaaagtagaacagtggctggccacaaacaggtgtttgcattattattaaagtgttgattttgcggacccaaggagctacgatgctgtatctgtgaatgaattatactaacaaaagcacaagtaaatggtgttgaggttcttatacctattttctgcattcatgagtgtcatgtcaaataagagtggggcctattttaattttggttgttgtttttattaagattgggaaaaagattattgtctggacagagttttgagattattagcagagtaagacaaccggaatagacattgatactgtcaaacattttggtatgcgtcctggactcagttattttaaattctgattctttgaaaagtcagctggctgactccacatgaggaatctcacaaagatatttcaccagatcaattagttcttttacatttaccttgaagaaggaagcaaactttgtattgccgtgataaatagaagaacgataaatgcacagaccaagtttgacttgaacacttcatccctcatttgagaatactgtaattaaraaaagagagaatgagttactttgcagcagagtgcagtgtttgaggttgagggaaacatcaagaagaaacaaggcaattagatttttttwaaattaagaataattcataycttaataaaaccttcacagagcattatccccatccctcctgccaactttccagtgagagcccaggagtaaatacaatgggagggatactttgcatgagcttatccagttcttcccctccctctgaactaacattattttaacagaacagaagagcgcacatccatatatgcagcaaatcaaatttgcattgactttcttcatgagtaaacttaagtcatttaaggatcttgcactgtttcgtgttaagtttgggaacacagggaaatgttttaccaggaagtctttctgcctccttttttttattaaaaataaattctcaggctcttaaaatagaaaatagcctaagagatctccagctagtgtagccttttcatttcacagaagagaaaccaagactaatagaccaatatgcttgatgcccttcgtgtctgctcaaggcagccctggggaatggtggtaactttattttgattatccagagtactcagtaatttcattgtctagctttaaaagcttctagaaggtcagcactcaatgtgtatttgccttacttctgcctactctcttgaactatcttggagttactaagctggggaatatctacttcctccagaaggtgggaaagtttttaaaactgaaaaagaccttagaattagcctaaaccaagccccacatttgaccttaatgagagagaggactagtagcaggcaggttattttatttttgggggatagaaaactaagtgtcactttggaactttgtaatctctgatttgcatttcatggttacttcaaacaagaagctggcaaatagaggtctcacaacatcttaggctctatgtccacaataccaagacaaggtttcagtcaggtcaagaaataataaaatcagtccaatctgttgttggtatggtgtttgcaataaacagttacatgatttttattcttttctgacttcttggkgtggtctgggttttagactgaaccccacttcttagtgtcatagctaaggtttggagaatatcctgtagttgttgagctctctggatgaagcacaatgctgttcagagactgcacagttattgcttttgcagggcaatgctttttctactctccagtattgaggcctctgtccacttgctggcaacctgcttgttatctggagggaaaccaggaacatggctctgaagaatcactttaagccatcctcaaccctgataaaaccacagaaagcccatattattaatattattaatagttaccaatagtgctacccaagaacaggtcacaatcatagaggcctacacagagcagcttgaaaattaattagccacaaagcagttaattcaaagaaagataaatgtttgaattccttctaacaaccaattacagaggatctaattattcatccttggcttactgttttttttttattttgtttttttttttttgttttttgtttttttttgagacagagtctcgctctgtcgcccaggctggagtgcagtggtgtgatctcggttcactgcaagctctgcctcccaggttcactccattctcctgcctcagcctcccgagtagctgggactacaggcgcctgccaccacgcctggctatttttttgtatttttagtagagatggggtttcaccatgttagccaggatggtctcgatatcctgacctggtgatccacctgcctcggcctcccaaagggctgggattacaggcgtgagccactgcacccggccggctactggttaatttcaaaccagcatggttgcgtagatttgataatgaaaatttaaaaacagcagtaataatcattttagtgtagttaatcagtacactaaaattcctcctcctcctcctcctcctcttcttcttcttcttcttccttcttccttcttccttctccttcttcctcctcctcctcctcctctcctcttcctcttctttcttcttccttttttttttttttgatggagtcttgctcttgtcacccaggctggagtgcagtggtgcaatctcggctcactgcaacctctgtctcctgggttcaagtgattctcctccctcagcctcctgaatagctgggattacaggtgcccaccaccatgcctggctaatttttgtatttttagtagagatggggtttcaccatgttgaccaggctggtctcaaactcctgaccttgtgatccgcccacctcggcctcctaaagtgctgggattacaggcatgagtcaccgtgcctggctcttttcttcttttatgtcatccacccatcatcatcatgaacatcaccacctgtcatcatcactatcatcatcacagcatcctggagctgtaattgaccattgccttcccaattcagaaatccttttcataacattcttgatgtctcctcaaatgtctgttgattatcatccgatgaccttctctgctttatctgggaaagtgggtttcttttctctggtcctaagcagggcatctcaggattctaaacaccctcaagttgaacactcagatcctgagcctgagagctcattgctttgcaaaggcttcctttccattattggcccatgatcctatgaaaagatcccttcctatagatcccaagcctgagtctctgtgactacttttatgaaggttttttactgatgacttaaaaaatgtgacataatcatcatttgtccagactaaagttgcgtaagatattatattttcaattttcttcagatggcaaattgggtggagacaaagtacrgagacgtactttgcttttagatttgtcactattttattgtgagcaaagccaatttctttgaacctcacttttcttatctgtcaaatgggaacattaatatagttcataagtttggcgttaatgtagttmataagtttgaagcattctattattttcctgtttgaacttcagtgcytagcataatcacataaaagaagaatcttataattgtgaagttgacatcatcaaatataaaatgctgtgtttcagaatgtggtgcattgttactctggaaatgcaaggagagcaggacttcgaaaagaaaattcctaattggctcagaatgatagagtactgagattgattagtgattcatttaacttcctcttgacttgtaaaggtctgaacactctggctcatagctttattaagttagttgtgtgcttattgcctgccaaagttaaggactccttgtctcatctctgttctgtcctcacctggccccacttatccttttatatctcagttgtgarcatgaactaatcaagagctagattaastggatttgaatcccagctctaacacctatgcaaccttggacaaaatctttaagctttctatgtctcagtttccttatctagaaaatggatacaataataggaattatctcataagggttactgggagaatgaaatgaggtaatatatataagatgcttagaacagtgccttccacgataaycctatataaatgttacctactgtcaatcaattaattatacttattttatttctatactttcwtctatgtgaagcttgccttttcaatgktgttgccttgcaggatgctgtcttctattcctctgtacagtattgtaccttgcactcagcggtgaccccaaaagtgttgactgatttttccaccatgttataaaagattcttctaaagaaattatgacctcctgtgtgttttttaacttggaagaagaccccactctcattattccccttgcttcttgaaagattacccaccaccgggtagaattcttaacttttctaggatccttaggaaaagtgttcttggaaatgacctgtgaacccttgtaatttactgagcccttggtctacaagagaacttggcaatcacacacacacacacgcacgtgcacacacacacacatatgtatatagatatatatttttttcagataggaaacttgaggatcagagatgtgaaagagcttgtcatagtcagttggtggcaaaattcagacacttggaacaaattacaaatacttcttcggagatcttagattaggatttggaatattattatttctcaatctttagggtcttagttgattcaaaaaaaggtcaaaatctaggataaggaatttgaataataaggactaatatctagtgcaagrctggtgctgtgatacacgctttacatgaatgttctcatttaactattgcaactcttgaagaaggtcttgtttataatatcctcactttgtagataaagaaactgagggtttgaataactgagtaactcaaccacaccttcacagrttgcaaatagagaatccagtgagttttgcwctagaatgcagggactcactggctactgcttccttgctattttcagagtaaggctatcttgttcataggtgcatgatcagatttcttgggtatatttcagtgatgcaatttawgatatacagaaagggaatgtgttaaaaatttaagcctatgtaaatcttggttagaatgaaagtaaagcatatgggcaaasaatggacattagaaacagcctaaaaattagtttaataaaatgccacygctatattttcctgattgatgaatggatcctcatcacaatgcaatgcaaaataatgagcccctttttaggccaggatgggtgaactgataatagggaagaaaacaaaagacagtagattttatttaaatgcaacagaaggagagtgaccacaatcttcaaatgataaacaaatcatttcaaaaatgaaaattcctgtttgatttgatgaagttcagacccattccttccaaggaagtggagcaggataaacttgtgtttcattttgttcatgtctggggattctggccctgaattatcttgaaagacatattcagaaatgaaatcatagtcatgagggtcaatgggtttttagatccaccacaaagaagctgagaaaccccagtctgatcacatgcaaaacaaatctatttcagatttcttatccacagagagatgatcagggaagttcgtttacagaggtgatggacagagcttccagccttccatgtttccatgcctgggatagtcctaagaactcttcctaggtgagggggaggaaaaccacagtgctttcctagactctccattttgactgtaagstaaaaggcactgaaagattcttacatttctacaagatgtagaagatgcttataactaaaacaattatctagttaattgcctaaactgtaactgtactctgtcttttttttttttgagacacgagtttcactcttcttgcccaggctgcaatgcaatggtgtgatctcggctcagcgcaacctccaccttgcaggttcaagtgattctcctgcctcagcctcttatgcagctgggattacaggcatgcgccaccacacccagctaattttttgtatttttagtagagacggggtttctccatgttggtcaggctggtcttgaactcccaacctcaggtgatctgctcgcctcagccttccaaagtgctgggcttacaggcatgagccactacgcctggccactctgtctttttatcaaagattgtaggtgagattacagaatcttctaggtggaatgaattgtatttgtcatcttgctccaatctttactaatgccagtttaactcactaatatctctcaggtataagctgttaactcctgcttgaatatttccagtgttgggggaaatcaagtcctcaattgggagcccatttcatttttggataaatttagtttgattaaagaaaattttctagcacatcttttattagtatatattaatatagttgtaaaagaaaattctcaactgggataacctgttcattttgcattagtggatgaagaaatttaaccactgttctgttgttaaattcatgcattctgtagcatggcagtagcatagagcatccttaaaatagaccatttgggctgggagcggtggctcatgcctgtaatcccagtgctttgggaggccgaggtgggtggatcatctggggtcaggagttcgagaccatcctggccaacatggtgaaatcctgtctctgctaaaaatacaaaaattagctgggtgtggtggtgtgcacctgtagtcccagctactcaggaggctgaggcaggagaatcacttgaacccaggaggtggaggttgcagtgagccgagatggcaccactgcacttcagcctggaagacaaagcgagactctgacttaaaaaataaataaataaataaataaataaataaataaataaataaataaaatacaccatttggatacaaggcataattgcaatgagactaattttcagtaatttttgaatttcaaaataggccatcttctctatcttggttcctacaccaataaaattattattaagagcaattaattctatgagtgacaggtgagtgtgcagaatgtctcactgacatacttcttcccaagcaaactgacctctgaacaaatgtggatttaatcatgttaagttgactcacaaggaaacatgctaacatgcgtttaagattgatgggcttsagaagtgcaaggctgggaggacacctgcccaggggtgacagaagaccctaggttggtaatacatttcctaatgttatgtccttccttgatagcggggttagactgggcacatgagaatttcaagaaaaacttttaaaaaccttccataccaccattcttccagctcaccctccccaacatctttcatccttgggaggaagaactcttcctttcttcactggtccagccccccacccacacccccagccatggagaagccaagagagtggtaactattgctatattctttacctagaagtccctggttgtagatgataatgatgtctacccatgaagcgttacaattgcttcagtgaccaggtcaatggcctcataattctgtaattctatattacactrttataggtgaaattggcacttctgactctgaaaatgctggctttatgggactggaactggctaattgatctgattaaaaaatacacacgaaatggtacttgatatcatttgactacctagagggtggtagaaacagctgtaattttgcaagataatatcaagacaataaaggagtcttataagkctactgtctcattaagggatggatttcttcccgaagcctctttgaaacctgtccttcacatctgaaggaggaggccaagatattcatactatgttgggacttactagagcagtaaaaactcaagagcagcctgatrctataacagaataaatctttaaaaatcattttaacaataagatcatgaaaatgactaggagatatgtgatttagaaaaatgaaagagaaaagctgagaccatttggttcatgcttcatgttcccatttctgttcatctaaataagacatggagtggttcaacaaattctgaatgtccccaagacaaaaatgtgcattttgctcgttacctaattccagagtccaacatcataacccatcagaaaattcattcatttgcttagccttcttttctttgcccagatttctcctttattattttatactaatcattacaactccaataaaagttgatgggatgaagtaagaaacattttagagtttatgattcatttttcttgaagtttttaaagcctccatttaactttgattttctttataaatgacagaaaaaaactgagagacattctggacatagckaagaaccaattgtactgagccaaataattatctaaagattctcttgtgtggcaaatccttggttttatgtggctgctaaccgaaaaaagaaataacattaaatgaatgtttttgaaaatactcagcacagaacttggttcatagtaagcactatttacaatagttatcataatataaaactggcaaaagcttagttgtgtgtagcaaacraagctcattcaacttcagttttgtttaatatgaatttgatctttttttttttgagatggagtcttgctctgtcacccaggctggagtgcagtggtgcgatctcagttcactgcaacctctgcctcccaggttcaagcgattcttgtgcctcagcctcccgagtagctgggattacaggtgtgtgccaccacacctggmtaatatttgtatttttagtaggggcagggttttgccatgttggccaggctggtcttgaactcctgacctcaagtgatccacccgcctcattctyccaaaatgctaggattacaggcataagtgaccactcccggccgggtttgattgttctgggaggctatttctggctttgtcttctcttgagccatcttgtcacaaaactacctccttgattgctcaagctaatcagccttttttgggatacacagttcaacggtggttcgaggactcatcattccttctcccactggcctaagaaaaaatgtttcatgtgttcatgtattcacttatttgattcttacgtgttcatgcatagttagggtgatagagttgcctttgttttcaggctacctttatcaagattgtgtctgttgccagaaacaagaggtggattgtttgtatatgtgtgtgcctatgtatgtgtacatgtgtgacatgtgtggatatttgtgtgtgtgtaggggggcaggggggaatgaatagaggataaaagaaatgttcatggttttaacttttttttggtctctatggtatatttgccatatgcattactgtataactcctcccttgcaacccactggctgcatccttcttgaatttcaaactatatgaaaatcaggtgcttaggagaaagacaggatttttcaaggtgtggcagaagtggtagaatagcttgggagacacagtgaactctacttgaatccccactctgctgccttctattactgtgggccttggaaaagctgctcaaactctttgagactcccttacctgtcaaatagtacaattagtacctccataaaggaagttgtgacacttaagtaaaatgaggtaaaacatttaaaatagtcatgatagggcctgatatggtagtaagtgatcagcaaataccagtttccttgtcacattgctgcctcagttgcaattcattgcagcctccaaggcacttaagtattatctgcatttcatctgcaccaccttgcaaagtggccattatcatgcccaattttaggatgggaagttcccagatcacaagccagagtgtaagttcccagggcacagaagctgtggctttatgtcttcctatatcatctcagtataagatgcccaatggagtggacacaaacagaatccaaaccaagcatactgaatgctctgagctgttcctratggacttcccaagaatcaatagcatgaatgctctgagctctgctggaggcacttcccaagaatcactagagtgaacactctgagccatgcctgatggactcccaaggaatcacaagaagtgtggacagaaagacaatcttttgcaggagcataaagaaacccatgcgtgaaatatctaatccttggctggcttgtcctcacaggaagaaaagcatggcctttgggaatgataaaacatctatcatccttgaagagagaaacaatccttatctttttttggaaaatagtgataataaggatcttagaataatcaaatcatttagagaaaatacaagcaaatgacacctacaaatttaaacacatctcagaggccaaggtggtcactgcttgtgctccagtgatcctgggagattgttggaagcacctcttccaatgagctacaaggctgtacttgcttagattaatgacggttggaaccctggtaccctgggatacaagacrcattaagattggcccatatgagatttatcttaaagagggtcttgccttgtgcaggtttgggttagaagaggattaattagaaggacaagggaaaagaaagactattgcatttatacaaacttctgttatatgaatattgtgccatttaattttcacaacaacccctaggggcagacaatcatactcatttcgatgagatcaagccccttgctttgtatcacccaaccggtaactggttggaactgggttcaagtcagaatccagtctatgttctttcctctgtctttcaacgaagactaaatactggtgagcgaaatgaggattttatacgtgtgtgtgtgtatccatttgagtgacagaaagatatcaacttgtcattacccattattgatcagtaaactaatcaactgtcctttatgctcacttctatttccaaagtgggacttgaactgaggtctagctgatcccaaagactgtggtcctgaagccattattagtctcttggagacatctcctctagacttgttaaaagccatattacccttgagttaggacccggggactttttgatgtaagctgatctctgaagatgtggggcaagtgaccagcccgagtctcatgctcaatcaaggacagagaaagatggccaacaaccaagaataacaaaatccaaaaaagagtatttaccaaaatgcaggtcttcttgcaaaatcagaatcttgggggcagagtgatgggatggtacctgcatttcaaacaagatccccagatgattcttaagtttgaaaactattagcctgagacaaagagagttttagtacataaatttgtcacaaggacaaaggatgccttttctcaaagcaattaagaatcaagaggaaaaatatcagcattaaaagaaggaaggaactttaatcttccttgatatggcttgattatcacagtttacccacaaaaatgcccatatccaaagcataaatatgcaatcaattttgaagtatatattaaacatgtcttaatctttattcaagatgaggaagtcaccttattataaggtgataatattgtttttggaacacttagcttaatgaaataattccaaataagtgttcctgtgttattaagctctcttaagatgctaaagttttgggttggctactctggcttggaaacatccataagtaaatgtaattaattgtcttccctatcctaagcctcattcagagccatttcccagaagagaagtgaggaccagaggctgagaaacatcaccttcttgtaagtgctctgaaaatggaagggcccaagataagtgatcccacaaaaggttaagttcctcagtgtgtaaagaaggctcacaaataaaaaagacaaaggtgagcactgcgataaaagattggcaatgaagacaaatgtgtaaatcataccatcaaggtataagaaatgtgcaagtcacaaaaggagaattataaaggccaaaatatgtactgacaaaccttctactgcaataataattttaaaaataaaaacagaaatgccaggcaggtgctgctttttacttcttaccaaattgacaagtttttaaaagtgtaagcacaatttttgagggcaacttcaaaatgactattaagtatttttaaatgtgaattctctttcacccacccctaggattttatcctaaaaataaataagcaaaagtgcataatttaactatgagaatagtcattacaacataatttgtaatttataatagtgaaaaactttttttaaaagcctgaaatagttaaatgtgcaatgagatagtatgtaaatactaaaattactgtgtaagtgaatatttaataatgrggaaaaaagctcaagcaaagaatgtttaacactrtgttacgaagccctgtgcatacaatggtctatttttataaaaatttttgatatggtttggctctctgtccccacccaaatctcatcttgtagctcccataattcccacatgttgtgggagggacccagtggggcgatgactgaatcatgggggtgggtctttcctatgcgattctcgtgatagtgaatgggtctcgtgagatctaatggtttttaaaatgggagtttccctgcacaagctctctctttgcctgctgccagccacataagatgtgacttgctcctccttcaccttctgccatgattgtgaggcctccccagccatgtgtaactgtaagtccaataaacctctttcttttgtaaattgccccatcttaggtatgtctttttcagcagcatgaaaatggactaatacrgttgtgtacataagtctatagattcacactcatgtaagaccagaatgacagatgccagaatggtaacagtggttaccctgggttgaaagatccaaagagatttcatttttttctttttgccttatacttagtatcaacttttactggtgaaaatgcattcttcttttaataagaaaatatccaataagaaatattcaataaggaaataccaatgtgattggtagcatctgacagacacattaagttttctacatmtctttaccatagttctgatttgtgcttgcccatgagatctgtaagcccacttaggaaatatctagcctgactaaagaagggcaaatgattcatctgggaaatgtgggaagagctgaagaaggcctttggcaactgcaataggtctcctctcccctatccagagttctgcttagaaagtcctgatgaytggctgggtagtgaaggaagatgttgagtcactaattctaacctggctgaggcccaagccttgggtcacatgacttgttacatatcatccacactgggtgattttttagagtgaagggaggtgatactaatttcacattgtaaaaatagacatctactactctcctgggcaaaccaggacatatggccaccatgatcataggaaattcacagatttatagcattaactgctgaagtggtcagcagctgtccaacgtcctcatttcacagataaagaatccaaggactagagaaggaaagatatgttcgctaagctacatgagtcatgagcatactgttctgaagcttaactcaaaagactcctgtgagggagcagggagtgagccacctttgaaattccatggcagggagtacacagaacttttgttctctgctgaaactccactaaaaagagtcagatcaaaattgacccatgcctttcggctcttagagttcacaaaaaatatcctgaaaacagctacagggggtgaggcagtcttatctaaccttcttaaactgagtctttattcatttccttattcattcaacaagtatttatgcaataccatgaattatataaaagtcctgtttcacataatgttgtggataggcacrccaattattataggcaaacgtgaccagggaatgtstgaatgatatttctgtacatttcgatggagctttgttcatttcggtgtttgaacatttcagtgttttcataaaggtggaaaggcaaacgggttcctatattcatttgtcttcttattgttcaaacggaataaagcctttcctttcctacaaagattgcaaaggaacaattatttttccatttccatttttcctttcagaaaacatacttttatggtccagacttgttcccaagaagaaaggtagggcagtggsaagagaaaaggctttagaatcataaatattgtatgtatttaaaaaattctaagacatatattcttaataaaaatrttcaattttccttaaaatgtacaccttracatctctgaaatcagcatgcaccttattatcaggggaatcctaaaatcttgagttctttccagggaggtttgcaattgcttctgtggtcaccaggtggcaatatcaacccaggatcattttaaattaaattctctgataatttttttttttttttgtccacattcaaagtgtgaattcatgcagcaaacctatgcagattccatttcggagtttaaattcttggggagcttcttccctttattaaatcaataccagggtataggcatatgggtttcctcactacccttgtctaagggggttgtcccactagcccctcagccccccatatccttacccggagggtgtaagcccagtttattagtgtgtgtgtgtatgtgtgtgtgtttcctcttagaaacccatattgaggtttttttttttttttttycctttytgagagctgcatagaaaatacagcatctcacagttgatgacaccttagagtcaatgaaatatagtagctggattttgagatctaagatctccacttaacctcttggaggttcagttttctcttttgtaagtggaatagtaaactgatgtatctaacagcaagcacagaggaactgcatattaatgctattttctgattctggaatcctatgtatttgaaagccttgttttaattttgttatggctctagaaccctttcctacttagcctctcctgtaaactccctctctgtgcctcccactgcatccaaagtttgacaaaaggaaaatgaagacagcacgggattgtcttcttcgtacgaaaccctgggaaatcaagtcctggggactcctggcagaggcagcatagtcaacagacaagagcagtggctatggcatcatggtaggctcagattccagtccctctctgacagtttgactttggaaaagcttcatartagtttctccatgtcacstttcaccaagtataaaatgaagctcataataacatctactttttattactgtttttgtcagttgatttatgcagacagcttagaaatagtgcctggtacttggtaaatacccaatgaatgttacttgtgatatattctctgctcagcagtaacacagtccctagagatggtctcagagcaagagtcaatgaagagtatctcggtaagagtcagtgaagaatatctcggtgacaggagaggagtgatcgtttgctgatgtgtcctgttgccatcaccactggggaacccatgcaatgcatagcacaggctaggtggtctgtggctagactgtcaatgggcaagtcccatgtttgttcagggtgctgtactctggctcttctagaakaatcttccctggtcacagaaatcaacctcaggcatgctgttcctcccttagatgtgaatgctattaaataaaacacactagaaactatctgtagtatgcacgggttaggttattagtgaagcaagtacatctttagcaaaaataaataaaagcgttttgtatagctctggacacaggtatttacacaagctaattgagaagtttctttgtaaagcaatctgctcttcatcctagcttcttcaatgcagtaaccgggaaagaaaatgtatttaatttggaccttaagcccttaattatatgatgaataagagaagtgtgtcttttactttttttgtgtgggttgagtgaggcaaaatgtttcttttccttttgttttgttagtacatagacacaatccatctcaaattgggaactgtaggtgaaggtattaattttggagtctgcaatccttaggtagctatcaaagaagctcattgggaatgctgtatgtgcacagaattgtgaattctctaaactaaggaaagcaaatctcccaggcagctgaacaaacttacaaaaaaattgctcactggagctttacagagtattgaatcaaactcctgaaatttgcttgtagattccctgctgttcctgcccgaggctcctgcagatgccaggcacctcttatgctcagtcaaggaaggtctgtcagcttctatcagcacaaaggagcaacccagttaagcaaggtcggcaccccatctgcccactcccttctccagttcaaagctgaggtgggggaggggaatggaaaaagtcatcattaatgtggtgatagctgccatccttgaacactttacctaatcaaggtgttgccctgaagactttcatattaactgtgaggtaggtgcattcattatcctcatcayacagaggggaactcacgctcagagaggttactttacttatctaagttcacatagcaagaaagtggcagaggtggaattcaaatttgactctgaatccacaacccatcttctttctactatgcctaggtcagaagactctgaggcagcagacaactggggaaaggggagaatagatatctaaaatctaagaaagacagtgtttatcactgaccgcttacatcaagttattgggtgccctcatttattatgttaaaatggttgcagctgatgtgaattcatctaaaagcaaagktaagtggctgttaatgccacttggcttaataatctgaaagtggaagaaactcttgatgcttactgagttaaaggagtctttgttctttgagtcttcttttccttaaagagcaagctgatgttctcttaatctaactctcatctcctttcatgaccttcagtctactcatgattttcaaggagaaaaatgaaagacagtaccaaaccaaaccaaagcaaacaaacaaagaaaccaaaaccacagcccctgggctctctctctagtcccatgaacatctaccacaatttactcagaaaaagagccgctgtggagacccagctctaccttgtgctccaggctggagtctttaaacatcagtgagaatggcttgatatgctctcttctcaatttatcgccactccgcaagtcgatggtatgttctattctcttgttaatttcctcaggcccagactggacatgcaaagcttgtgcaagatggtttggaagcagatttattgaatttcttgttagggcagccagagtctagggggaaagcacatgcaaacacaataaacctgctagtcccctttagataaaacagaaatgcaatgtttttaratcatgttgcattgcaaacagtaatagcattccatgcagttgtattcagtgaaacctacagaagttgatctgatagcatttggtgcagagaaatacaacctggcaaaatatcacatccagagggacacttcctttttctctatgtaggcacactgaattcctttggttgaggtatttggagagttgttggcttagaaatgttaatcaagaccctttctctaaccaggcacaacctgggtatgagagaaagagaaccaaaaaaataacagaaagtaaatatatgttaaaagtccccaaaaatgatcatctccaactgagtagattccacattttcgtgtgacctttcatttaatggtggtggagagacttggggtcttatggcttgcattttktttttttagcattactcatagaaagacagccaaatatgccaggatctgctccttaaacttgataaagattgctaaattttttacttcgctaatatgtccctccctcagcataggccattatatatctatatattcatatagatatatgtgtgtaattycttttaggtaaaaaatgcaagcaacttgcagcctcccaccatttcacagggttacacagcacgagacggggaaaggcataaccaccayggttggtcactggatatggatacatggatgcagaaactgcattggcttacgaagacacaccaggtttggcaaggagacctttcctcctggtgattcagtagccaggataagattaactggctgtatctagccaaatgcagtgttcactcacagcaccaatttaaggcagcttcttagaccaaaaaacaaaaaaaaaagtgtgagttggacctgaagggatatatagggacaaggaagcccaacccatccttccaatagatcttcttgaaggaaagtagaggatgccacgcatctgtagagtgagtaaggaagtgaaaattctctgcctttatacacactcactgcatttgcttttctctgccagcctctcagcttggctatgtttagaacacaggctagatgaagataagattatggagtcatcaaatggcagcctgtgagaggtgacataggaccttgcagatcctcttgccaaaccttcagatatcgatgagcctcagagagacttgctcatttgcygccaagccagatctgctgactccaggaccacagctggagtcaggagctttgacctctgtgaagccatccagcccaccccataaggattctccctatggtgttattgaacccttcattttaaccttcatgaaggtaatcaatgtaacataaattcaaagcttctaaagcattctatagcagggctcatcacggctagactttactgaaaccctcttctccagccctagaataaagaatagagctgcctgtgccaacatgagaaagcaaagtacatgctcttagggcactgaagcatgtaatttcagctctgagtaccaaagagactactatagagaaaaaaatagatgttagggggtggcatgttaggagaagggctggagcagagacaaggaggccagaaccaatgttctggagaattgaaaagcaggatacatgcggggccagagagtttagtccctggaattaaatgctattagtgcagcatcccagagagcaaaggaagctgaactgtcagccacttggtggatttctcattggttttttggtcagaartttttttcatatggcatggaaagtgataaaactccattttccrtcttggagaagagatggaaatgacagtccagctgtcctcgtctgaccatacattctgaccttgggatgccagggtgccctcgtaagtgcttggagctggggtctaacagctggagaggaaatctgctacaacatctgagcacattcatagttaggcatctctcactgtctgatatttttatttgtatatggttttccttctattaactaaattgagcttatccactctaccagtcccttgtgccttcagtgactctaagacttttggatttcacagaggagagaagtttcaaaaaatagtttggggattgatttctttaaatttcagtagcagcagcagcagtagcaaccacagytctttaatatgaccattatgtaatagaagaaagggcgtttttttttttccttaacaggaatgatgtagtctcagaataaaagacagtcctttacattgaatacatttaatttaataaataactatctactttgtccttatttttctcatattaatgtgaactggtgaaaatgttagcaggaattgatactggtatgtagaggacatttggaaattaggaatagacattgcttcctggttgcctgtgctgtattcagccgtccattcagagaaggattctgctgccattggccacttctgtaggatacagaccaatgaaatctcctcctttcgaaactcccctgctcctctccacattctattggctgtctatgtggttgcttcaaatgagagagaaatttagaggcattcttctttctttcatcaccaccaccaagttataggtaatagttgggaaggagctcctttcatcaaaatgtcaataatgtggtggagaattcttttcttgcccatgtagttatttttattctttgcaagtgttttcctagcattttatgcaggtagtcaattttcagtgatgttttttctgattatttcctctgtcaattacatatgacaattacaaatgctgtttggccagcaacctctctagcacctaccttactccttaggagtatatgtgcttaagggaagaccatcattaactcaagaaggcaagcaaattgaaactagagagggacatcaggaaatcatctgctttcatttaaccctcagtacactgcaaaggctacatgtctttgggggtgactatgatttgggattatctgtgatacccctctatctcattagtcattagtaatgaccactaagatgtcaccttcagtgggataatgttaccaacataaaaaatccatacactgatatattcactatattcacagtgattcatttgtaatcagtagtggagacaggtataacttgtcttatttgtctatttagagtcattagagtcatactggaatgagctatttttaatagaatagggctttctctttttaagacttacagcaccagtgcgagctagactgagatcatgtttaaaaatagcataagcttccaaatgtgattccagtattaaatggacctccaaaatgttgagacggttctttcacataaacactctaaacaattggctaaagaataggaaaaacaaatggacaaaatggaataaaatggaaaatgccataatacttgactataatataatatatatatawtagaatacatatatttgaacgtatgcttcaatgtatgattgaagtatacattgtatttatatataatatatgtatatgtgtatacttagctggtgtttttgatatttgggatgtcagattgaagcagcaatgtaataatgttataaatgatgttataaataaataatgctattcatttactttagctggtgttttaggtatttgggaagtcagttggagcagcagaaatggcagagtttgcagctgagatggcctctcatgactgagttttttcccaaaatgatgttgaattccctagatttatcctaatggagattcgtgctctcctcaggtatttccataaatgtttcctccctcacaggtgcttgagatagatcaaagtgcaaatgagaaccagagttccttctgaactgagtctctgatgataggatcttgcttgacagtttgggggttctggtgaaaattataatgagagggtcaggtagccctttgtaaattgcatttgaatgggctgggggaagtcacaaatcctcttaagctcatcatttggtttatgatcagaagactcttctttaggacttgtcttttatctgtgttcccagtaaaatcctacttttcttgcagatcctatcacttcatggattgtcataaaayttggtattcattaatcagtttgtcacagcaaataattcttcccagcaagactgcaggctgaaggtgtactgtctagaaacatccagttttgttgagtcaaaaccatttcaggtcttagggatcatacgctcaaatctcaaaagaccctttaaagcatccttacagacactgcaaatcagcttacatagttacagcactggagtgatctatttcgttgttagatcctcctaattcactctttctcaaaaatgtgtttcaagaagcacaagaatgatgagatgtttcattacaaagtggttctgtggaccaatcagtttagaaaatgtagatccattatttgtttactgccatttctccttaccttaattttgtctcttttgttcatgtctttgtccccagggcctatgacaatgcctgatactttgtagtcacttaagtactttgtaaccacaataaatgtgtttactgaatgaaaaatttcttatatcttcctatctcaatacactttattgagataaaggcactgataagttccacagaaataagacttttaaactctgcatcttccaaacttttttgaccacaaatcccccttttcttgaattgcctctatatgtttcatggaatgctatttgggaaacagtgctttaaagttcttccctgcttttattcagaatttccacacactagacctgtttccgatttctgaacaagatctacatccatctcccttcatgtggctgctttccagtgtccttagctttcttcaccaggcacatgaaatgtatttccccagttgttccataggtgatatagtttctacatattgcataattcttcttagtttgtccttgccttgtgggyactacttcacagagtatcagacccagtgcacgtggcatctgaccttgtggtggaacatggacacctaacataatctgacctattaagtaattactcattttatgcattgaaacatgtagcatctaggcatgtatcctactgctactataaaaaacaaataagacatcacctcctccagtaagcctactctgaggctgcaattgtccttatcaccattactatgattcattgtaattgcctaattaggtgattgtttctctagactatgatctccttgaggccaggcactgtgttttatctataactgagtctccggcacctggtatatctgctaggttcataataagtgtatatgaaaggaaggaatggatgagtggatagaygaaaggtcaagtgcctttataagaagattgtcgaacacatggacacagggtggggaacatcacacaccggggcctgttgtggggtcrggggagkggggagggatagcatttggagatatacctaatgtaaatgacgagttaatgggtgcagcacaccaacatggcacatgtatacatatgtaactaacctgcacgttgtgcacatgtaccctaaaacttaaagtataataaaacataaaactaaaaataaaaaaataagaagattgtccctagggcagtgtttctggtctttcactgcaaaagtccctttagtttttttctgttctctcccaaatggacttcaaattttggaaagattctgtttaccaaactgtattaaataagaagtagtttattttcctgctatttgatcaaatgcctagtttttctcagcatgagataaaaggcactaccaatgcagttaatattccagccaagagcaagggcctttaaaggcagcctagtgacgcttgtcaatgtgaggttttattcagacttttgggacccagagaatgtcactcccattactacttcccagtgctggctgctagagcaccagagaccacaggctggcaaggggtaaccttgagccttttctgggaccagcacctgggctaacttcagtttgtgtgttctccatgagccagttgtggaaggaggttaaggtcactagtgaaagcactttattctttattagctcctggacaaggcagatgtggtagtctttrgatttagctatagtagttgtgactgaggtctcacagtgtgggccaactcattgctgatatggaaaagacctagcgagaacgccaggctcagcaatctcaaggcacagctgtrcagcttctgtctttcatgctgagatgtcctaacctttcccaaagactctgcttattttcagtttcaggctggaatcttcattcagaagtaggtagggccagtagtttccccaacctattctgggagcacgcttccattacccctgtggcagcatgtttctgtgcctaacttggaagcctctgtacctctattttaaacytgatgcctgcagcctttgggttgtggaaaaggcagaggttccacctttcagttcttatgaacttcctatgtcctacaagacacaggaaaaacagtgagcctaagtaagagtacctcaacagtgcacattacagcgattctttctctactgtttgttaaaatgccaacccaacccctggaagagaaggcttctactttaaaaagagtcattttgtgttctttttttgacagattataataatatacaattatgtggtacattgtgatatgatatacgaatatgttgtacaatgattagattaatctagttaatatacccatcatcttaaatacttatcatttattcttcttaagaaagctcataccttgggaaagcttcaaggtgatctagtctacaatggtttgcattgaggacctcagggaggagaatgcttgttatgtttgaaaatggcacaatttttttccctcaaatctgggaatggggagatatgagatgaaatattttcctagtaagaaaatgctaagtggtatttgagtaaacattgacttggggagcccttgataaaatatccacatgagatctccaagaccctgtcttataacaagttttccttcttatgggagtggaggtgctagtgaataggaacatttcccataagcaaggtatcttagttaagattgttgcaacttttcttgtctatactaagagaaaatgaaacagtacagccaaatgatctgtttgatgcttttttagttagaaatcatgcttacttttccttttattttttgaatatttatgtcactgtaatctgttttccaagaaaagcaaatgaatgtttaacgagatcttattgtgggagaaggtctgtgggattctgctatggaaagcggtttaaataattttcataatagtctcatagcttctgccccaggaaacgatataacaggggtcagaatgtccattctgttgcaataatagcctagacatttctataagcctactgtaggatttcagcacccctctgttgtctggtttcccagttatgagtaaacaatgtcagtctggggmtcaggtcatttgggaaatcgttgcttcccatctttaggcagaattggaagtttccgactattgtctggatgctaactttgatagggatgaagggatctgtgacatcctttgattgacttttgttcctyggtgtcctgaaatttcagtctatgatgaagaaaataaaacaatgacaaggcaggtgcccygactctggctgataccacactaggcacttactcatttgctactcattggaaccccacaacctcactcttggcctttcaactaatattggtaaactggagcatgaaaacagtttaatcatttgggggtttaggtcccaggatatccaagcacaatcctgggctgtcttcctggtgtgctttgcctggcattaaatgcctcacctcttgcttcagttcaacctactcctgggtcatggctttagacacagatgtactctcctggttctcttgagrtgtgatgtgggcaagtggtccgctgtggcttctctccaggttcaaccacaattccccgtgattgggcagagttctcaggataagaagactgagacctcacagagggaattaccaacattctagattttgtcccttagagctggcctaaggaatccagccaggttaacttgggtcaagtggggtctgacaatgattccctcctgcctgagaagcttrcctgactctattccaccaatctattagctaatcctagatgcttgcctctgatattattctttgagctccttaaaaagaagattctcatctcagtttgggaaatgtgattatgtctgagacattacacacttgggtcatttttataaaatcaaaaaatgttgttaaacttctgcagaattggcggaaacagaacttggcacactcatttagatccgaccactttgacgccacatgatttgaggcaaattgtcaattgaattgaatttttagctttttaagtatcacatccgtagtaatgtgtggaacagatatgcaaactccagcacggacttcatctcgagattagggatggtgtaagtgctgggataaggtacgatctaggaatggaggcaagatttctgccaggattcacatgggactcacaagtaggggagagagaaactgaaacattggtggtttgttcatagggccacagggtaggtgtgaattgaaatatctcytagcactgaattagctgggttgaaatgtcattggctgtagttggtgagatgaccactatcccattgactgaatgaccttgggttggcaacctggagaattttagctcaggaaatgaataaacaaacatatatccagacctaagttactccattttcttgtgaacatcaaagatgtggattttttagaggtgtcaataccatggggagaagaaggtgtgtgtgtgtgtgtgtgtgtgtgtgtgtgcatgtttatatgtgtgtgtgtgcatgtttatgtgtgtgtttgtgggtgtgcaagtttatgtgtgtgtgcatgtttatgtgtgtgtgtttgtgggtgtgcatgtttgtgtgtgtgcatgtttatgcgtgtgtgtgtttgtgggtgtgcatgtttgtgtgttttggggtgtgcatgtttatgtgtgtgtttgcgggtgtgcatgtttgtgtgtgtggttgtsgttgtgttttcttaatagaaattttgagaaaattgaaatagaattatttaaatgtttagctttgaaggttcagaagtaacttttaatttaggcagatgaaaaacttacacatcttgggttgctgataaattgctcatgtttggtgttttaaatttctcagtatgagttttttcagaccactcttatacaatttactaatcacatgtagttattgatgctttccttaatttaattccaatggagcaacaaattactgaccttcaagaatccagcatctcttacttttcaccagttgtgtcagggcaaaactgggaaaagaagaaacggtctatgttagagctacattgctacctctttggggttgtgcctgctacttccttttaccctaactttcccaacacacacatttctataagaatggtgtaattggtttagcttttctggttttttattatcccgygtgtttatttccaggcttatcmcttatsagtggtcctgtgtttaagttttccccagacatgaagtccagagtgggtgatacttcatacaatgtatccaaagtccttactatctcacagtgtgacatgattctttaggggactaaaggtaacataaaagtcacacagtgggaagagacactgccaaatctagtggtgcataacctgaaattcacaacagtagtttgggaatccttgagatagaagaggaccttgcaaaaacttccatccatactgtatgcttactgaagataagccactgtaagtctcttttgacacaaggggaagtaaaaagaagtacatatataagtaccgtggctgttcaggccaacaaaaatatccgttatcttttctctggctagaattcagtcaccttagaatgggaagacccttgtgtttgtgtagagcaggaaaactggtgggtcagggcacatataaaattacttgaaaaatgggaataaaaattcactcacatcaaatgcaattttgcttggaaagaaaaaccttcctcgatatgaactgcgctgtgtcaaacaataaaagttatacttggtggcaaagagatgagagcaatcctggtgtagctcaatgaagagattttacactgaaggatctgagcccagtccttggcaaagtgaacaccaagaatgatagaaaataaatcccacttctttgttttcaaattgaggaaataagtcaggggaaaagaatccagatttttgcttttactcttcctacctatcttctcatatttaaaatatcatacatttccaccttgacatatttaaagtgctatacatttattgggtcttgtttgtcagccctcagttttatgactccccaaacaatgactcaatatctcataaaagaagagtccaattcgtttgtgtagaaaagttttagcaggttatcagcaatgggagtaaccgtggctgcatgatgtatgcttgacaacctaaatgtgtatttttcatgtctgtggttctacataagcctcagtcctatctctacctttatctcttcttccttagtctaccccaggaacttcagagaaaggaaggatgatgagtcaaagcaaatggatccaattgcctacttaatccattcaatgttctctggaagscttcaaatccacttgtcttttgaaacagagtgaaaaagcagaccccactaatgattctccctggctgaactcagcagctatcctcagattcagagctcaggacagcctggggagttttattgtcagaaaaagccatgttactggaagaatgcagcttgacttcaggaaaatttccaaagatttccatgttcttgaccctaagtctgcagatgtcttatctaataagcatcaaaacttaatctgatgttaaaatggttaaaaaaattacctgtggggaaaaatatgcctgtgattctctgcatatttatattgaatatggacaattagatgtcctgtaacttatcacagaagcagttacctctgaaaacacacctttctaaagatcaagattcaatatttcaggtgtttttagggggaggaatttcaggtcagaattccctgtagggaaagagaaatctgtgctttggtcttgagcaaagaaactcaggctgagatggtggacttgctttttctcccgttctaaggtcttgttccctcattcttggcttaattcctgcttgcctgtagatctcagcttaaggtatttcctgattaactcagatcaattttccctcatctactactctactactctgtcctgccataattgtaacaatgttcacagtgagcctgctgacctcttagtagcaccatcaaactaagctccggagtgcttgccccaccttcgtctctatccccagatcctagaactttactggcaaattgtagtttctcagtaagctgttgataaatgcatggctgaatgaatgaatgaacaaataagcatcttgataggattgcctttcttaagctgaatgataaaagtaagatgagtttgaatttaaaraatgcatttttttgcacgccttcatattcacraaaaagaggcttgccccttagtttgaatccaccctttaggggcagaaagaagaaggaaagaaatcaaatcccaggsaacaatatcactcaataagagaacataatgaccatggtgaaaacaggaccttgaaagcaggcaaagtgtgatgatgtctgtaatgatgtttgggtgtttatctacayaaaatcataagttatgcttagagaaaagggtaaatctcattccctagttaggtaagattttacctcaaatactttttaatttttttttctttaactcctgttgctgaatttggtattcatgttttaagacggttcaccaggataagtgtagctgttaccctacagtaagataactgtaaacagtggatgtccccatggcttcctggtaaattatttatggatggtagaattctgaagtgtatgtggctcaccagtatggccacagtcttggagcctgtgtctgaggtagggaaactgaatagggcaatgtcagagctgaaaggaattgttsgatcatccagtccagttttgctattgttcaaatgaggacaccgagccttggaggggagaagtggttgcccaaggtctcttagtagcaactggacaaatctgactccaactcagttctgcttagtttctattcaggcccttccactatcatatgtgcaaatttcaattcctgcagagatttactcaaagatcacaagactcacagtctacagaattaaccagttcactctgaggagcctgaggctcagcattggatccacaaggaggtttcaatcaggacggcaatcagatgagaattcttccttttcttctaataaatacagagaacaagatctaagaaaagtcccagctggaattggtgaagatatagtaacctaaatatattctttgaccatgttcaccagcccagccagcccccactgacttcacatttccttttcttctggtatcaacatttgccaactcaagtgggactaaatcaaattgttgtttgtttgtttttactactaggcacatgtgagaggctgcctagtgttgccttgttccaggcaaacaatcatcatgcgaggacactcaggcaatgagatccttcttggttgggtaggatttccaaaatttagctggagcagaatctggtcatttcctgatgttttcatttaaaatttctaaatagccgtggtgagcaagtgacccacatatatgagagggtgaatacatgtacacacacatacacacctcacacatacatacacatatacatacacaccacacacatactcacacacaccacacacatatacatacgtaccccacacatacatacacatatacatacacaccacacacacacatatatacacgctacacacgacacaccacaccacacatacatacacatatatatacacagcacacacacatatatacacactacacacagacacaccacaccacacatacatacacatatacatacacaccacacacatatacacactacacacatacaccacatcacacatacctacacgtatacacacatcacacacatacacaccatgcacacatatcatacatatatacacataccacacatatatacaccacacacacaccacattcctaccacacatagacatatacttgtacacaacacacacagccacacatggaaagcaaatatgcttcattgcctggaatacagataaacatccacgaggtcaccaacactgacaggagtagagagctttacacatgtttatacacaccccacacctatacacatcacacacacatatacacaccactcacatacacacacctcacatcatatgcacatacacacatcacacacatacaacacatgcaacatatacatacataccacacatacatccatatatacacacatctcacacacaccataccacacatatatacatatatcacaccacatacacagcaaacatacataatacacatataaacaccacacacatacaccacatacataccgtacacacatatacatgcacactacacatatacacaccatgtacaaatacacataacacacaccacaccacaccacacacatattcacacacactacacacacaacacacataaatactcactcaccttctgagactgacagatgacctgaaaacaaggtagaagatgacacccagcatatatcttcaggccacaaagayggaagcagtgtgaactgatggaaagcatggggctttttgagtcagatatatggggctctaattccatctctgttatttaccagctatgtgtccttcagggaattaatcaattctctctgaatcccaattttcccatttgtgaagtaggcacatcacacttaccctgtaaggttggtgtgagaattaggtggaaaaacatgggcacaccactcccgacatgctacctgtcccraagctctctactcctgtcagtgttggtgaccttgtggatgtttatctatattccaggcaatgaagtgtgtttgctctccatttgttacatggagatagaaattccatctgtgtttataatcctcatggtaaacacattaatttcaagataacaaaaatgcctcaaatcagtctattgcatagaaatgactaaaacatacagtggaggtaccagttgtgtacttttctccatatgactctttcaaaaggcctagcggagtaacagaaacatgcctggattctcaggctgtaataaatgtgaaagggatggatgggatgaagatgattccacaacatacggaaacaaattccaggctctgaaaaggggccttgcttctcaaagagtagcctcagttctcttggcatatcacttgtcataaaaatccagttaaaatgattaatatcctacacacaatacatttttatagctacataaaaacctttggtatcttcttgaaaatctgaagtctaagacggatcttttttctgctaagtctactcttgtcccgacagtccattcttcacaggcagccaaagtgatcccttaaaaatctaattgagatcacatcactgccccgcttttaccctttctatcacttctggaataaaatacatcaacaaagcttgcaggacggaggtcccagccccttcagctccatctgttactccttttccctgctcactatgctctagccacttgggactttttgctgttctaacacactaaactcctttctacctcagggtgtctgcactgcttttcctctgtttagaatgctcttttcctgcttatttgcatgagagtccttttagcactcatattaaatctttagagagactttctctgacaatgccttctgtatgctatatactccctggtcatatctctctatttccttcattacacttatatgttttgattaattgtctgcattcctcactcctttgaaatgtaagctcctgggctgggtgcagtggctcaagcctgtaatcccagaactttgggagtctgaggcgagtgcatcatttgaggtcaggagttcgtgaccagcctggccaacatggtgaaatcccatctctactaaaaatacaaaaattagccaagggtgctggcacgcgccggtaatctcagctacytaagaggctgagttrgaagaatcgctggaacccgggaggcggaggttgcagtgagccgagatcgtgccattgcactccagcctgggcgacagagtgaaattccatctcaataaaaaaaaaaaaggagaaaagaaaagaaacataagctcctggaggacaggattcattcattactggatcctcagtatgtagtacacttgagtatctgttaaataacagaatgaacaatagctcaagcccagatatagattttactcagagcatgcagcagaaaaggaaaatataacctttatgataaggatcctgttsttatcttcctttcatttgcaatgttgtctttcaactgagagattcaatgtccatgttgataactcatttaataatctagccttgaacttcctggatattctcccccatatgtgaaatttttcacttttgatctacttcaatcatctccttctactttttaaatcttaagttccaatagtccacctgtgatcataaacttcttgccttctagtttccttactttcatttcacctggaaactcaaggcatggggagtctcactgggatctgagtcagggttcaggaaaccaaggcatcaaattaagaggcagaacatctgcacttgtcaagggccagggatataaaagggcatgggtgttcaggatgtccaagagcaaaacttggataccagaatggggtcaaaccaacaattttaacccaaatggatacagatacaggggcagacaagacacagcatcaaaaccaagggagtatggtcaggcagacagaaactggaagactcacataaggggccacagataattattagtgattttcattgctcctccaagccatttacaaactactgaaatgggtagagggaagggaacaggggtggaactggagttcttggaaacccagagccacctcttaccaattatgatgacctggcttctgactctaccatctcaccagatctgcctcttgccaatgatgtccttcaatccagttccaataggcagctatcagtcttcatcttcctgggcctcttgtctccatttgactttgctgatggccccttccttcttaaaatgccatactctaggcttctgtgacaccacattccctagttctcttctgacaactttgactgtttcttctctgtctctgccaaggaatacgaatctttcaccttccaacttgtgctcctcaaggtctgcttgtgtcttcttgttccttaattttacagattctcaacagtgatctctttcactgccatgtcttctactaacaccaaaattctcgtgactatgaataccaaattcacatcccttgcacagttcttttatgcctgagtttcagaaatgtgtgatcactctccctggatttttcccagacacttcaagctccacatgtcccaaagagaattcctagtcttcctcacacaatctcctattccagtactgcttattttagttggaagttctatcatcsacgcagttccaagcaaaaaatctagaattcaaacttgactgattcctctccctcactacccatatctatcatttaattcacttattcaacaaactttaatcaagccctgtgatttgccaggtattgttctaattgtgggctaaattgtggtaagtgaaacggatataatttctatcttcattaagaatataaaccactggctgactttgtctctaaagtgattttttttccccatccctcctcttttttttttttttttttttttactagcagtagttggcttgtaatagatgctcaattaatccttattgaatgaatgaatacatgaggatgtaactatctgaacatctgctatctacatagcacagaatatgacacagcaatttgatgccattaaacatatttctaagcacatattatgaatgaatagaagccaaaacatctggccaatttagctggaatacccccagtgaagcattagcatgctttatctgtgttatgcaaacactcagatggtcggggcttccgtggaattgactgggtgttttggcaaagcataggctcagccagaccagtcttgatctcttccagggacaaattatgtctctgaattgcacatatggctcactgacttctagagttaggcataagtacaaacattgaatacttgtgacggttttaattggctcagtaatttccaaaatattattggtggcacgcggttattcatgaatatcagcacacattcacttgctcttcagtctgaaggcatcaaaatgaattcagatttttcgtgctaaagatggcacagatgggttacatccaggcaaaacttgggcattaaaaaaatacacggtatggttaaacaacactaacaatctctagctaataatgacatctcttataataggtatttggtgacatcaggaaatatctttaggaaatcagcaaataaatatttcaagcattcctatacartttaaccacatcaatcaactatagaataaaaccaagaacctccacctccctcttcttggctctcagttattagtagcaagttcatgtacaatacagattagaacattaaggaattatcttaattcctacaatcagcataactggagagagatttttcaaaaataaagacaaaacaaaaactaaaactgagagagagaactttatgctgaggtattcaggatgaggcatgcatttctttctctttaaataatcagcatacagacccaagctaacaataggcaaaagcagcagagagggcactgtcagctggtcatgcacccactccaggaagtatataacaccattattttataaaacagcaaactgtaccatgcacaccaactcagagatggaaagaacctaggcattgcaatcagttatgacttktgtgkgcataataatttttgggggaaattaaacactcacaaaagagctgtcgaagacctaagggtcaactcttgcaaggcatgcagcctaggttcaacctgcagcttttcccagtggaatctggcccatgcattttctcatagtttttcccccacagatccagaaagaaaccaaagacagcctagtctcagagtgccccatcaaactttcaaatgcagaaaaaagaggggagactttcagcattttaacctttccatttaaaatttttttaggcagacagatttttcttatctataagttaatgagaaatgttgaggtctatggaatttaaaaattaacccttatatgtcttcataaaactccagacactattggctgggtacttcatggtactctcagcttctgcttggtcgaggatcttatcagaaactgtcagataactgtcagataagtgttatatattggctatttttatttctttctctaaaaatgtatagtacagtcacatcattgaacttatgtgaattcaactaaatgtgctgtgtctaagaggttaaagggaaaatccatattagagcaggtaattttgccatggctccaagcaagcattctgggagaacagaatctctgtgtccaccttggttctcgacctggctcagcctcagttctctaagtgcctcttggagtctgagcatctcattgggtttactgtgatttcaatatttgaataaataatttaaaaagaattttggttattggtgatctactccttatgtactgacttagtagccctgtccttcatagaagatgcaaatccatgctatataaaaatagaatcatgtgggtggctttgaaattgcatgctcctcctgaactccctaactctaggcatcacttggtgctcctttcctatttccaaatcwgcagtgcccccctgattttgaatctcagagggtgacacagaactgatgatggccagctaccgaaaaaggggcattcccatgtacttgatcctcccctttagtttaataacaragggtttattttttccaacatgagtggtttttttttttttttggtaaaattacaattcagcttcacataatatttatttttagctaggttacaaaaaaaaaaaaagagagagagagagggtgttaggaaccctctggcatttctggcatttcctgaaattgcatacgaggttaattctgtcctgaggagacagagagatagtttgatcatttgcaattatggtgttcattggagaaaaggttaaagatgaatcagttttctctgaggtgtctggattggagatgcacacgagcatgcattcatggccaagcagaaggaggaagagaggacttacattctgtttccccacgatattatcaaagggcagttcagggctccaggatccttcagtgaatgtggccccactgtttctccggtctgaggagctcactgactccttgacgatatcttcaggcaaggacagcagactgtcctcaggctgcttaattaagtaagtttcgatattatgcttcctcaggaattcattcctctctttaccatggccctcttccaygttatagtcaccgttgagacagtccagcgtggctttggaaatgtgaatcctcctgtgtgtagaaggcataggtcattacacrctcctgatgttgcctgcaaaggctatatttttttgacctgtacaaaaccaacaccaggttacacaagggtattattaggacatgtcctcagggacaatacttgtcttcctaaaaagtagaaagaataaaagaaaatagaagcataaattcatgagcacagtatcacggacatcgtcccaagagacactgctgcctctgataaaatacagcccttctgagccacacctaagcacatcttttggcttttcttatgattgtcagcctgatcccagcaaactttacaaaacagtgatttttttttcagtcgtgttgattatattggaaaaacaagtgctgcaaatgtttctgaaccccagtggcaatcattatccaaatcaccatgcaaaaacagttctttcttcgtcttggaacctgtcctatcatttcaatcttcatgtatttgtaacttgtttctccaacttgtctatattcttctcaagggtgattctgataagtccatagggctgcactgagggtcctttgggaaaaccactgtagggtacaatttcccctataacatgtatattataaggagcaaagaacaaagctgtggacatgtgcaggctggcagctggctgggctcactcacaagtgaagtgactcatggctgcacaattgtcagccactgtggctcatgactcaggcttcttttttagcaaaataacatatgacatcagggccttgaggatcaaacttgattcatggaaatttcacatggtaaattcttctggggaagagtttttctgtcctcgtaactgtctaactcaatcatactacttattgcgttatagtgtggtctgggtagactagcaaggtaaggtggttacaaacatggacttcattgctagatctcctagattcaaaccgtagctctgccacttgccagctgagagatcttgggcaaattacttagcctttctatcagtccattttcttacccataatatgggaaacataataacacctatctctgactattattgtgattattctacgagttgatttgtgtaaggtagtcaaaacagtgcatggtacaacatatacactataaaagcaaatatgtaagttattaagagtattctaaaaaatgccattgtcatcatattactgttgtgtattccatgccttctcaaggcttgcagaagactattgtcaggccttctgaataaggcctccaagctttcattctctggctctgtcacttcaaagctcattttctgacactcctctaatatagctctcctaygctctctccagctattcaagtaattggcaattctccagattcaacgtactatttggtgcttactaacaatytcctactgtccaattctgctcaaaagtcatcttcctaagtttactttagtgttcatttgaatgaaagaatgcttaatattttgattggcttttggaatgctaagaacaatatatccaagtaaacagaaaagtttttaaaaaaaatttagagtggcttttaaaaatgcactgtagtggctcatgctgaggaagccgagactggtgaattgctggagctcaggagtttgagaccagcctgggcaacatgacaaaacaccatctctacaaaaaaatacaaaagttagctgggcgtggtggtgcatgcctgtagtcccagctacttgagaggctgaggtgggaagatcgcttgagcccagacagttgaagctatagtgagccgagatcatgccactgcacttcattctggaggacaaagtgagaccctgtcttagaaaaaataaataaattcattaattaaataaaatgcagtttacttttagtattagctctgctactccctctcatccttctaacccattctgctaaatccctccttacagaaagaatagttcattgcaaagaacatgtgaaaaaccagaaactacaaacaaatcatttctgatacttcatgttctccacatcttccacataaatatcttgattgatttcaagtgcaagatgttaaaaataaatgtgtgaaagatgttttcactctcttgagaaatgtgctgaataaatacaaaatattcccaagatgcattttgttaatacayatgaactcaataatattgacctgggagaataacagatcgtttgaccttccatgaaatggaagtccccatccgctttctcagatgaatctgagttaagactggaagcttaccttttctcctagacaaaatgaacctggtaggagggttttctaaagtaccatggttgattttcttttaagataattaagttacatatcaaccccttttagcatttctctggattctatttttattattctgctgtcagtatgcaaggggacaaatacttccatgtattaaatcaatattatgttttcactagtgaaagagatccttgccttcactgattcttctgctgaagtgctaatcaatatgcacttaaatgttttggtagaaactgggttttagatgtttcttttcatccttgttactaacttgagctttggggtaagacatttgcagatgagattctgaagattgcatttctttctaaggaaatgtgtcagttttcaggcatttctttctaaggaaatgagtcaagtaaacttggcattttctgataaattttaatgctaggatataataaaagtagtcatgatactaaattaagacctaacaattgtgtaactcttgttttgcataaatgttatctagtagccaaaggtgttactgtgtgccccatggattatctcatataatttccgttctttcaacaaccttaggtattagacatttctttgtctccttttgcagatgctgaaactggcccagaagtaacaagtacatatttggccccaaatcatattagtggttagtggcagtgctggattgagacaagaacttttactttcagcgtctctctaccaccctggaactgtattatatggtaactactaccagcacaaccacaataaatatttactgagtacaggacaaaggactttatatgcattatttcatttaacacaagttcaaaaatggtgatcttcatggtgtggtactaaggccagcagttcctaccaggaactggtagaaagcatcatcttgagttccatgccagacatactgaaccagaaactcggcagtggggcccagcaagctatggtttaataaactctcgggtaattccaaggctgaggtttgagaaccgttcttctagaaacccaaggctcagtggtgttaaagaagaagacaataaaaaagtggaaaaatataaaacaatatcaaaccatggtgagtctggggtcccgttttgacattcctgcattttgcacattgacaacatgccatggctaagcagagatggatactgaatagaagactagactacgtgctttataagcactatcatatttgaaactacatttttaaggcggataatgttttcagtccaaaattacagtgaagaaactgggaagggcatgaagtacttgccacaatcttccagacttcataactggtaagtagtaaacccacggttcagactcatgactcatgatatgaaaaataagggtgtgaaagatgatttaaactcagtcacttttctgtttctttttacaaattattttattcgtttctttcctttttcaacttttattttagaatcaggtggtatatgtgcagctttgttacaaagcatattgtatgatgctgaggttcggggtaagaaggaaccctcacacaggtagtgaacatactacccaacaggtagtttctcgtcccttgtcccactctctcccttctccctctagcaggccccagtgtctattctcgtctttatgtccatatgtactcaatgtttagctcccacttagaagtgagaacatgtggtgttgggttttctgtttctgcattatttaaattaagataatttctttcagctgcatccatgttgctgcaaaggacatgatgtcattcctttttatggctttgtagtattgcatggtgatgtgctgatttaaacttggtcactcttctgtttcttaatgttattgagaacaatagctaaactggcttccagatatcaaagcagtatcttacaaacccccaaagcatcctctaaggtttgcaaaaggaatctattgagtatatgggcaattccccatttggtgatgcttttaagatacaggcctggaaacacagatgaattggctaacttgtttgtctaaattcagcaggtagttacttgtgggaaaatcctaaagaatggaaagatttaagaaacccagcagtgacacatcagaccttcctcaattctaaacctgtctggcaaacagccatgacacaccacatagagtgaaggatccccataagaatagtaactgacctggggtgtccctgcacagtgtacaaaaaaaagcgcttcatacccattgcctgagataatcttcagaggagacctgtgaggtggattatgccattatagcagatgagagaacaaactctcatggaggaggaaaataagttcacaaggtagcaaatcataagtagtattatctctcttcctgcagtgaagaaagttggactcagaagttaagcactggcctgagatcacacaggtagagtgatgcaagccaagttcacactaaaatcacacgccaggtgctgtgcatgctttacataacttgctgaagataatagagtttagcaaggggcagagtgggaatcctagttactctgattccacctcttgttgtctgtttcccccatgataacatattacttgatattaaacatagtttgcaaggagtgatggcacataccagagaaatctgtgactccaagggcagttctagggggtaggaaaaggaatatgtggaagtgctctctctctctctctctctctctctttctctatctccatccatccatccatccatccatccatccatccatccatcatctttaagaaagagaggctgcagaaaatcacactggctcacatatatctgagatcttattaggtccaatctgtgtaaacagaatcttgatacaacttttcaagacttacattagttgcagtggcctttgcagaccactagcacctttggggatcctatgtcaaccaaccttgacagccaaatttgaaatgttgagtttctaaggaagagcctgatttcctcactgagtcctagatcatgcatggaaagtcagtaggtcttaatcctggctgcccattacaattcactgaagaacttaaaatagattctgcacagattctgctttaaataaactggcatggggtctggacactagtattttttaaatgttcctttggagattcgaatgtgcagccaagtctaaggaccaatgctgtgcagggcagagacccgaacacctcagtgttattccacatccttrttgcctctgatgcattttactagattttggaagctaatagttgtatgatgtttcagtgtctggtctccttccaaataattgcttcctagatctaaccctgaatttctgtacacaggaaacccactgtcacaaaataagccaatgacaaccgttaagcatgaaaagggctttgctttatcttacccrgggattcctccagattcgagtttgtttgcaatatccacatcccaagaccagacatcaaactgccacttccktagtcccaaaacaccgcacagcaccgagccggagtggattccaatcctcatgtcaacatcgtgttttgtccttgaccgcacatacctgttgacataggtaaatggagagacacatgtataagaccagagtgggcatcgttggctctgcactttcttttctttttttttttttttgagacggagtttyrctctgtckcccaggctggagtgcaatggagctgcaacctctgcctcccgggttcacgctattctyctgcctcagccttgatggtctcgatctcctgacctcgtgatcctcccgcctcggccttgcaaagtgctgggattacaggygtgagccaccacgcccgtccacctcttcactttcaatgtcaccccttccatgaagccttcttaggttctttaataactagaaagagtctctgaacatccttagccttttatctgtacttttaagggctctttgaaaccttcctccaaaacctgctstgtaacctctgtctyagggaatggcaccagcatctttttctacccaacattaacctgagatagattattgatttcatacttcattacacattccatttccaaccaaaatgtcaactgtttccttctttctagcccttctgtgacttagttcagaccaccatcatgcctgagtctgggatccctgcctcagccttacctccttccagcccatactgtcatggtttccagctgctccttctaaacacaaatgtgacctcattaccccatcactcttttctgacctactacttagagctgtggtctctgaaatagagtgtttacatcccagggctgaactgggtcatccgttgagatgcaggaggaaaatgttagaacttccattcacagcttttgttacttatgttgaaaagctttaccaacatttgatatatagattgatattggaaacttaggggatacatgtctggtcatcctctgactgtaagtatggaggaggcatcttgagaagacagaagaatttctaccattggatgatttcctgtagtcatgagcrttctttctttcagagtattttgaacaattttagtttatgattaaatgatgtcatttatgcagaaaatcaaatggtagaagataatactttgtagtagaattactagaaaaaccttcattgccccccaaatgcaatgattatgtgacttcaaaatgcttaaaagagttgtcagacttaaargtgagctattcatttgtctttgacagaagacaagtgttccaaatttgctgatatttttgtgataataagtcgccattaatattccttctagcatatatttgaaaaaaacacacaaacttgcttaatttrtttcttccaactcaagatgatgacttaagaatgagcaagaaagtaactgatttttaaagaaattgatgctctgaagaaagcattttgagaatggaagtttggaaatgtttccatctttttaagaattttgttgtaaaaccaaagttatgttatatcatctatcaaaattcttagagctgcacatttactaatgtttaaatatcttctaaatgaagatttctgatgaggtcagaacccatttataagggcttaaatccatttatgagattggaaaacatttataagatatatgtttagctctgatagccactgaagcctggtatagagataaattgaacttaaaacctgacctttacattactatatcacaaactattaaaaattttttttaaaaagaattatgtttaaacccattgctctctaataaatggtgaaagcagaaaagtctaaattaaattgtaattaatttaaratwttttaaawttgtaatcaaattaaaatatttaaattaaattggatactgtaaattaaaatactttaaagtatttttattttctcattatcctttaaaatccctatattatgtatattttatggtatatatttttaaacatatgaatataattaaatataattaatagaatagttaataaatataattttattagatatgcatatcttcatataattttattaataaaaataggggatcaaaatatttagatactactggtctataagatacaatggaaaattcctagtctggcacacaaaattcctcatgatctgtccagtgycttagttattcttctcattcctcatgcacacattagactccagccatccaaacaacaagtcattgtctgaaccttgtgttccttctttcctctctgggaccatggtgcttcctcaatctggaatgtccattacctctttcaatggaagagcttctactccatcttttagagtgaagcttggtttaactctggccagtaagctgccctgatttccaagtctgactatgtacccttccctgtgttctcattgcatcctgggtgaacagtaattagggtgctgtgttataataatctgtctcctgtaaactaattgagaatggggactttgaacaactactctgtatgttcccctcttaagattgtactgtatctggcacgtggttaacacttagcaggtgtttactgagtaggtggatgggtggatgcctgggtgtccaatactttctattaatgttcatatatatccaagctttttggtaaagagtataaggtcctcgaaggcattattcctgcctgaggcagccttacattcctcacagcctggagcatcctgctttccatacagtaggacttaagacatgcagtgtccttttttaaaagaaaaaaataaataaagaatgaatgaatgattccatgtactcaattgaatctttgcagtctctgttcttaaattgtaaggtaatgcaaagctatttacataagaaagtaaagttgaattgggttgagaatatggaaatattgtaataaattagacattaggcaggcaacctgtgaacattagaagaaatgcttgtaactaatggatgaggtttttcttgatcttggtgaagttcctggtttctgggtcattgtttttactttaactcccaagttaaaaagcatatggtactttatatctactgayaatgaaaactgtaggagccatttaaaaaaaattgacaaggcaagagaagaaatggaatccagcctttgagaggagcacatcagtttctgaggcacttttccagtgagcttctgtgcaggaggtcattgagaggagtcatttgtgctatccacagccatgcccactactatactattcaagtgtatagtaggattgtcctccctgcataattttttaatttttaatttttgtgaatacatagtaggtgtatatatttatggggtacatgaggtgttttgaggcatgcaatgtgaaataatcacatcatggagaatggggtatccattccctcaagcatttatcctttgagttgcaaacaatccaattacactcttttagctattttaaaatgtacaatcaagttattattgactatagtctgttgggctatcaaataataagttttatttcttttttctatttttttctacccattaaccatccccacctccctcctaaccccccactacccttcccagcctctggtaaccatcattctactctctatgtccatgagttcaattgttttgatttttagattctgcaaataagtgcaaacatgtgatgtttgtctggatattgatgttacttttgaccaatgaaatatgagcagaggtaatatgtgtcacttctgggcagaagctttaagaccatgatcaaccacagtctttaaaattttttctctcctgtgtcaccatcatgagtcaaggagctcctgatgaagccttctaaccagggtccttgaatcaggataaaatgttatgatatcctgctatcacacccccctcctgtaataaagtgtgaatgaaaaataaacataaagtgtgaatgaaaaataaatgtttactgttttaagcactgagattttagggatgtttgttactatcctgactggcacaatcatgagtcccaattgatgttttccttattacactgttgtcactgtagtatgagggttaatatcacagactttagtgctagacagccaagttctcatcttgttccatcactgactggcaacatgaacttagagaagttattttatttccctacagatgctttaatctctgcatcgataaaatgttaataacgttgtcaagattaagtgaataaacacatgcagggagtttataacagtgcctggcctataataaggactagttgcttgtctactatttatgaaggaattgtagcctgagaaagtaaaatgattttccctatggcccagagctggtaagtaggattccaggactaaactggtactgttgtgtttttaaaacccatactctttgaacatgtgatcctgggcacatagtttaatctgaccctgagtttccatagttgtaaaataaggcactacctgattgcttcacacacagaactattgtgagccccgaaggatataataatggatgttaaagtgctttgccagctaatggtgagagactactaaacagcacacggcgctaatgtcattaggcaattaacattatacagagaatgcactggagcatcttaatgaaaagacatttagatgatttttattttcctctacaaaacaagaagcatagcaagaagacttcacatttttttactgcatagcttttctttctctttcattttgtgtctgggatttgacttaaagataagaatgaaactatataaaagtaattaataatttacagacattgatactcattagtaaggctaccctgtggttgcaaagaaccacaaacacacacaatgtatttcaagatcagttcttgaggggaggacctcggagcattcttgaagctaaaatggagacaattctactcctagcgacaagtcttgttcagttcttccagagcagagccccagggatgttttgctgtgcctaatcagtcacaaattaagagaaaaggactatagatgacatctgcatcttctctttcttctctagacactcggattctggagggcagggatgccaccttccattcccacttagctcaaagctcagcacacagacatagtcagtgctgaaagttatttatcaagttaatggagaaagctcaatggctttctgggttcacaggcctttggctgtcccaagatggatctaagagtcccagagaaaccactgagttgccttaggacctcctagttggggaggggataaccccctaaacctcctcctttcaaacagagcaaatctactttctgttcttcatggtgagattccattcaaaatttcttttaaataaaaaacacacgtaattatcattattatttttgctcacctctgtctagctggggacaaatcatgcaacaattaacaaaccaaagattgacaacattatttcttttaactgaactattaaggaagcatgttataattataaggtaaaaaatgagggaccttagattttttctttcaacttaaatgcttcaaagggttctttttagacaattaatccataggagttgctagaggaatgacaggacgcataattcagtagcaatcattgatctatacattagacaggaatcccaatgctgtaggggctagagcaaattacacatatttccccagcaacaccacacaggcatagaacatgcattaaagcaggcccggatctgacatcacacttctccatttactgcttgtggatgtcaggctagttgctttagtctcagtgtctcagtcttcccaggtgcaatggggaagagaattggtcctctgtagaggtgttagggtggttcataaaataatgtatgtaaaacacttagcctggtggatactgaacactcaaaaatagtacctagtactaacttttggaagtaataccatttttcaattgcacagattgaatcagaccaataaaatgatgaattgatcactttacctacccttttctgctaaaactctgcctacatcaactctattcacacagacatagcttcaaccaacccatcagcggcacagttcttaggcataaactggtctaaacagagtgaacaatggttacaatttaggcagaattgattgggccccagtcacctggaaaaaacggtgcccttgaacattccagaacaaaggaaaggcaagggagttagttatggaggtcaactacgttcattgcccagggcgttttgtgcagctatggaatcatcttcataacaaacctgggtatcactaccagagccagtttacaagtragagaactgagtcacgagaggtatattgctttacgtcacacagttattgatggactagttagaatttcaccccgggtrtataagcctgaacccattggtccatttctacttccctgcatggcttctttaaagggaaatacaaaaggaagtatgtggactactggggtctgagctgactcagcccaatatatggacacagtctctacagattaatctccaaagcctcccttcttatagatctgagtttgctgagggtacttcaggagtcattgtggggtagggactgccattgtggtggccatgragcccaacttttccttcaaccctgatccattctattgcctctgctggactttagtgtcagcctgccgtatgaaacgtagggtccatctgcttcttaaaatgtttgaaagccaccgtgtgttgggagcaagcccctcaatgtctggccataaactggccccaaaactggccataaataaaatctctgcagcaatgtaacatgtccataatggccataacgcacaagctggaagattgtgggtttacgggaatgagggcaaggaacacctggcccacccagggcggaaaccgcttaaaggcattcttaagccacaaacaaaagcatgagcgatctgtgccttaagggcrtgttcctgctgcaattaattcggcccatcccttcgtttccctcaagggatacttttagttaatttaatatctatagaaacaatgctaatgattgctgttaataaatatgtgggtaaatctctgttcggggctctcagctctgaaggctgtgagactcctgatttcccacttcacacctctatatttctgtgtgtgtgtctttaattcctctagcaccactgggttaaggtctccccgaccgagctggtcttggcaccatgcttaccctgacatgaaagttgtgatttcacaaagtgcttcccaattcatgttctcattttgatagccacagtgactctgaaaggtagatgcctatcaatattataaattttgattttatagatgagcaaactgaggctctgagaggattaagatgcggttattacctctcctgtgctaggccttttaccttaataacctcatttcatcctcatttccaccacaggctacatatacagctcatccatttattctttcaacaagtgtctgttgaagaactctaaagatataagcagtgacccaaacagacaratcaagttctgcattcatggagcttacatcaatgtggtttattcccattttacaaccaaggaagctggagcccagagaggttaagtcacacgggtgttaggtaatgccagactccaagctgaatggtgtttggatactttgctgctgcttgcactcccttccagtggaaaggtaatggggaagacctaactgcactcacattcaaaagcagggtggatctagggagagaaaagtgagagcaatggtgttcttgaagatgaaagcgttgctgacccttcctgccctggtgccccggaatcttagaagaacaatagagaccaagtcaggacagcagctgtgcgccaagtcagcatttccttgttgatcccgctcaggggagttctgaagttctgaattctggattttttaggacaatttatttcctgaaatggccctaactcaggggtgagggaggcacagggagtttgtgtgtgtgtgtgtgtgtgtgtgtgtgttgggggtgaaaccattggtgcttcttttattcccgttaatttcctctccttccttcaagatgccccttattgtatagtgcatttccttttccaacgtgccctctgtcctacctgcctggaagcactcagcattccctagcagcccacatctggccctgtagcctggcctgctgcagnnnnnnnnnnnnnnnnnnnnnnnnnnnnnnnnnnnnnnnnnnnnnnnnnnnnnnnnnnnnnnnnnnnnnnnnnnnnnnnncgtttcttttaatacaactggaatgttttttggagttattacaattttcaagatacatagggtaatactcagggataaatattcttatgattctctgattttgtgtgggtcttaatcaactcaggctgccataacaaaatttatagactggatggcataaacaagaggaatgtatttctcacaattctggaggctgggaagtctgagattacggtgctagcaggatcaggttctggtgagggccctcttcctggcttgcagatggctgccttcctactgtgcccctacaaggtggagagagagagccagcaagctctctggggtctcttctaataagggcactaagcctcatttaaacctaattagatcccaaaagcctcatctccagatactgttatatttgtggttagggcttcaacacaggaatttgagggggataaaattcagcccatagcagtgtgatttattaaatgagggagtaaaacctatttttttaaaaaaactatattatgaaatatattttaagagattattcccattttaattaatttaaaaattatttgttttgtttcttgtcagtaaaaataaacaatgttggataaaattttagatgtcaacttagaactgtttgagggatgtagctttcaacattattttagagagtatggagcaaagagtttgtaaatcactgttttaaaaaccagaatcaaacccttccattggacaacctctaatccagtgctatagaaattgtgtatcctggccgggcacggtggctcatgccgtaatctcagcactttggaaggccaaggcgggcagatcgcctgaggtcaggagtttgacgccagcctggctaacatgatgaaaccccatctctactaaaaatacaaaaattagctgggcatggtggcacacgcctgtagtcccagcttctcaggagtagctgaggcaggagaatcccttgaacccgggaggtgaaggttgcagtgagccgagatcatgccactgcattccagcctgggcgacagagtgacagtccgtctccaaaaaagagaaagtgtgtatcccattaggtgttccatgagagaagtctctgtttaaacagagctctgtgggactggtcagtatcgcatgtccaaactgggagagtcatttaacccgaaacttcatctacccttttgctgttttttaacatggcccagacacttaacagttacaggctcatgtggagagtgtggggagtcctggccaaagatttttgtgtgcattatttaactcacactcgcacacacacacacacacaccacacacatgatgtatgttgtgatgggctatggccaggccagctgtaggcacatagatacagtgagagcaagaacatggctctgtgtcaacaggaatttcatgtaaaggggttgatctctgagtgccaatgtggcctctctcctagcctgcagaagagtgggtgcagagcttgagggttgggtgggtaaatgtttaacaactgtctctttgggaagaaaaggtcctgatttgtgatgtctgtcaacttctgtggtgtcactatttttgtcatggatgagttcaagcttccaacttgaggtcaactggcttgtaaaattcctgcaagtttaacagttggcttttgcaaacagacaggggctgacctaggcatatcactttttaaggcttgtgactgggtagttttctcctcctaggggcagctgagaccactgcaattcacttccctctgtatggaacagagagggacaccacagcccagcccacttcctgtgcccttactcctctgtgctttgtgtcttgcttgtttctgttgtggcaatgagctgaagtcacttcaactatcctccagtattcaaacctggattagtccttatggtgtggccttccacattattatccccatttcctcaggaagaaactgagattcagcatgtttaaaattcttggaagcagggcctggtgcagtggcatttgcctataatcccggctacttggaaggctgaggtgggaagatcccctgagcccaggatttccaggctgcagtgagctatgattgcaccactgtgctttagcctgggtgacagaacgagactccgtttcttaaaaaaaaaaaaaaaaaaaaaaaagattcttagaagtagaatgtaaaccaagttctcctgaattctaaatcctaagcatttcctattatatcacgtggcctcttcccagaagtgtcactgggttagagtgagaactgtgttacatgaagacagtaagcaacagacaaacagtgtgccagggacactgtgaggagccttccatttagaaccaaaaacaccgtgatccaaggatgctaatggaatatggctccaccgcatgtggggctcctggtatttcaaagggaaagacagctgtggtcacactagactcccctgcccacaaacctctaaaggctctgccacttatccaatgaagtgaaagtgtttttactattactaagttggtgcaaaagtaattgcggtttttrccattaatacattttgatagtcaccctgactcatctccatatattctaactctgagcttttgcagatgttattgcctaagggagggaggaacactgtgatttttaattttatgtgtcaatttggttaggcctttgtatccagatatttggtcaaacaccaggctagatgttgctgggaaggtgtttttttaggtgagatgaacatttaaatcagtagactgagtaaatcagattaccctccacaatgtgtgtgggctttacacagttgaaggccttaagagaaaaattactgctgttccccaaggaagatgaaattctgaatccagcctgcttttggactcaagctacaatatcaactcttccctggatctccagcctgctggtccaccctgcagattttagacttaactagcctccacaattttgtgaaccaatttcttaaaacaaatttttataagtaatacacaccctgttggttctgtttctccagagaaccctaacacaaacaccttcctgtcatctctacctgtcaatacttttcctttttgaaataacattttcttttctagttctattagttatacatgattattcccaaatattaaaaaatatagtaaagaataaagaagaaaattaaaactactcaatttcatcacagagctttatgtcmtttctttttataaaaatagatgtattaagaagtggaggttcccattccagcaggggtagctaaaaataaataaaaaattaaaaaagctgaagttggtttaaatatgtgtgcatgtgtgtatgtgtgtattctactatgtatactttaaatgcatgagcatttttcatgccattgaatattaatgtaaaccatgatgtttaatggttatccatttttctttttcttttcttttttttttttttttttgagacagagttttgctcttattgccccggctagggtagtgcaatggcatgatcttggctcaccacaacctctgcctcccgggttccagcaattctcctgcctcagcctccctagtagctgggattacaggcacgcaccaccatgcctggctaattttgtatttttagtagagatggggtttctccatgttggtcagactggtctcgaactcccratctcaggtgatctgcctgccttggcctcccaaagtgctgggattacaggtgtgagccactgcacctggtcgttacccatttttctattttttacatatgccagaatttatataatcatttccgtacctttgaacatttatggcatcagatggtgctgtggtttgaatatgtcccacatatttcatgtattagaaagtctccaagtggcagtattgaaagggggcttttaagaggtgattggatcataagggatctgcccttatgaatgaatgattccattcacagattaatggattcatgggttaatggattagtgggttatcatggcagtggaactggtggattaataaggagaggaagaggcttgagccagcacattagctcactcaacccctcatcataagatgccctgtgcctccttgcgctttcacagcgagtctccagcagcagtaagtctctcactagatatggtccctcagccttggacttctcagcctctagaactataagaaataaattccctttcttttttttttttttttttwaattgatcattcttgggtgtttctcacagagggggatttggcagggtcacaggacaatagtggagggaaggtcagcagataaacaagtgaacaaaggtctctggttttcctaggcagaggaccctgcggccttccgcagtgtttgtgtccctgggtacttgagattagggagtggtgatgactcttaacgagcatgctgccttcaagcatctgtttaacaaagcacatcttgcaccgcccttaatctgtttaaccctgagtggacacagcacatgtttcagagagcacagggttgggggtaaggtcacagatcaacaggatcccaaggcagaagaatttttcttagtacagaacaaaatgaaaagtctcccatgtctacctctttctacacagacacggcaaccatccgatttctcaatcttttccccaccttcccccctttctattccacaaaaccgccattgtcatcatggcccgttctcaatgagctgttgggtacacctcgcagacggggtggtggccgggcagataaattccctttctttaggcatagtctgwttcaaatattctgtcagtaagcaacagaaaacgggctaataaagatgaacatgattcagagcctttgctatgtcacttacaagctgtgtgtcattggtcagaagatgtttttattctatcagagcttgagtttcatttggaaattgttcttcacagagttttggtatttgtgaagtaattcaggtagattatttagtatagtgcctggcacatggcaaacattctatcaatattagtttatcaacaattatttctagatatattcaattttcattattacaaataattttgctaaaaataaaaatttctgtccatgtactgaacatcactctaattgaagcaggcttatgagtgctgaatttaatgacattttggaacagagtgagacaagggatttttgggggaaataaagaaagggaaagagagagagagaaagagagaaaagaaaagagggagaagaagtgacgaagggaaggaaggaatagacagaaaaaaatagaaaaaaataaaatgtaacaaagagagaaataaaaaggaaaggaggctgggaggcaggtttaggcattcttgccttcagtaaaaacaatataatttctgtttttcgtttcttgtcctgccatattgcttggcagggtgaccctgccacaaggattaagacctttactctgattaactgttggggacaaaccagttactacttggcattctgctgtcattcctatgacttttttagcaattgcactgaaaagaccaagctctgcaattttcattaagattaatcaagaacaacttttgcagatcattaataaacattgcatatgacagagcccagtgtcagccctggcatcttctcaacgatcaggactccccaaaacagacatagaatatgtgaagagaagccacctggagccacttttcaatctatgtaatagaatctattatataaacctattttaattaatttaattttatgaacagacatgcatgagatgacattaagtgtttcattggaaataaaattacattcaatctcttttttgccattcatctagctaatatcatgtttctaaaattaagtatttttggtggattgaatttactatgaggctgttttgattagggcttattatcttgttattcttagatgtttattgactgacattttcctctttcaatatcagttctgctaaagtattagaaatgtaccaatgtatgtaggatctcctaaactatatgttgatcctttgrgtattgatggcaaatttcaggcatcagtagcaattgcacaaatctggagttgggaggtgggctaccatgatgactaagatagacggctttgaagtcagatgattccagaattggtccccttgtgctgccactgactagtcatgtgatctaggtggaggtaattatacaacctctgttagcttgtatggcagaggcacctgacagccataactgaagcataccctgagggtgaccctatggtctaagaagagcgttagtttggagttccaagctaaggaatctgagagtggccaacatggagatccactgcttatccatgaagaacagccaaacctctggctcattcccctggcacacaggctgtaaggggactgacgccctttgctttggatgaaatgggggttgctaggtagagagcactaagtaaaaatgctgtataaacagcatactttttacaaatggtagttgtcttcttgtgcagggtgccaccactagaccaccccatatgtaatttccccctgtaaaccctatgtcttatttgctgtctctaggtctcatcttcagcctgagacacmgtaccatccctactggatgcaataggggtccagcactacacagctccaattttctcattggtaaagtaggagcccacttccagaccttccattagttaggacaaacctgtctagctatattgtttgttgtttgcatccattctcattgttgctctaaactagtctgatttgtccatgctgcagacatacttagttcttcagtatttggcctatcaccccgcctatcttctagaatttttatgaggacttaatgagccaatacatgcaagacatttatctcagtatctgggatatagttagtgtttaagaaactcaagcgtccgggcacggtggctcacacctgtaatcccagcactttgggaggctgagacaggtggatcacaaggtcaggagatagaaacacagtgaaacccagtctctactaaaaatacaaaaaaaaaaaaaaattagctgggcctggtggcatgcgcctgtagtcccagctactggggaggctgaggcaggagaattgcttgaatccgggaggtgggggttgcaatgagccaagatcgcgccactgcactccagcccgggtgagcagagtgagactctgtctcaaaaacaaaacaaaaaacaaaacaaaacaaacaaaaagaaactcaaactgctatcattattttatgggcatagaatagaagccatggtaaaacaataggtttctgtaactcaactgcatcaaattttccaggacccaaactcagcctcccttgcaatattctattaaaaatatttccatagtgataacatgcatgctacctatttgaattttcctatttgaaattgggatcttattatcctcattttgcagacgaggccatggaggctataagttaagtcacccacccatcattacagacctaattacaggaagaggcaggaaacagggtaggtctgttgctgcctgtcaagggccccccaacccatcccactcactcagcatattttctatgtcaccttacagtacaataggcactctttcagggaagctttgtcacaatcacatccagcaatgaattataattttaataaaatggaatcctgactggaattcttggagtagtcaattgaaaattagtttaatgtcatgataaatgtttggtttaattaaaatttgtatgtcacatattgtctgttgggtgactcttggaactcagctttgatgtgttatcatcccatcctttctatttcacagctgctgctctatttcagatccttacttctctcccctggattagtatgagaatatccccaaaccagtttccttccctttggcctctgctcctccattccagtgtcaaggggagagagagttatccctctccacagtcatcttcctgacatccagatctgaccatgtcacttccctactttaagagtcagtgacttttcattgcctgagggataaagccccagcgtatcgtaccctaaccctattgttttaatttagaattgtggtaatcaccaaggtcagcttcaatgcttaacacacacacatgcacatacatacaaacacatataaacacacacatatataccacacaggtacatacatttacactcatacatacatatgtacacacatacactaatgcacacatacatgtggcttttgccattcttaacagctagcatgactcattgttcaagcctttgtttccaggaaaaaaaaaaaaacctttggttcttggtttaaaakgctactgtgcaaacagctcagtaaaaggcaaatgacagggaaaaaggtttccctcatactcgtacttttgattgacttgactcttgcccactttgcatttaaaaaatattttttattttattttttgtacattgacaggtaaaattgtatatatttgttgcataccacacgaagatttgaaacatatatacattgtggaatctagctaattaacacatgtattacctcacagttatcatttttatggtgagaacacatgacatccagtctcttaccatttttcaagaataaaatatattgtcaactatagtcaccaagatgtataataggtcttttgaatttatttctcctatctaattgaaattttgtatcttttgattaacatctcctcaaccacactccaaccacccctagaccctgataatcaccacctctacttctatgggttagcttctatagcttccacataggagtgagatcacgaggtatttatctacctgtgcttagcttatattttttaacataatgtccacgttcatctatattattgaaaatgccaggatttccttctttatggtgtaatagtattccattacatatatatatatatatatatacacacaccacatttttctttatccatttcatccattgatggacattcaggttgattgcatatcttggctatggtaaataatgctgcaataaacatgggaatgcagatatttcttcaacatacagatttcatttcctttgcataactactcagtagtggaattattagacatatggtagttctattttttaagtttctgaagaactgccactgttttaaataatgactgtattaatttacatttccaccggcagtgttcaaagtttcctttccaccacctcctggtcaatacttgttatctcttgactttttgatagcagctattctaataggtgtgaagtgatatctcattgtggtttttatttgcatttccctgatgattagtgatgtttaactttttaaaaaatatacctgttggcttgtataccttcttttgagaaatgtatattcaggtcctttgcccattttaaaatcaggtgattgattttcttgctattgagttgttggaatttcttatatattttggattttaacctttcatcagaagtatagtttacaagtattttctcccattctgtagtttaggttcactatcttaatcgtttctttcgttatgcagaaagtttttagtttttcagatagtttgctgttaatatatagaaatgctacttatttttgtatgtggattttatatcctgcaactttactaaatttgtttaattctaaccattttttttttggtggagtctttagggttttctctatataaaatcatgtcatctgcaaacagaaacaatttaacttgttcctttccaatttagatgccttttaattctttctcttgtttgaccgctctagctgggacctccagtacctatattgaatagaagtggcaagagtggacatccctgtcttttttcagatcttagaggaaaagattgcaactttttattgtttaaaaaatttgttttaatgacagggcctgctctgttgcccaggctggtgtgcagtggcacaatcataactcactgcagcctgaaactcctggtctcaaggactcctcccacctcagccctctgagtagttacgggattaccagtgccactatgtccagcttgggggaggtcaatttgaagaaccaaagcagtcacctgtggctgccgaagagaatacagtggtgctaacacagcaacctcaaattcctgggctcaagtgatcttccctcctcagcctcccaagtagctaggactataggcatgtgcaaccacacccacataatttttaaatattttgtggaaatgagatctttctattattgctcaggctagtctcatactcctgacctcaagctatcctcccaccttggcctcacaatgtgttgggattacaggtgtgagctgctgcacttggcctaactttttcttattgagtatgatattagccctgggtttgtcatatacatggcctttattattttgaggtacattctttctctaattaattgagaattttcatcatgaaaggatgttggattttttcaaatgctttttctgcatctattgaaatgatcatgtggttttgtcctttattctgtcattgtgatgtatcacagttattgatccatgtatgttgaaccatccatgcatcctgggatgaatcctacttgagcatggtgaatgatccctttaatgtgctgttgaatttgtttttctagaattttattgcatatttttctttatcaggaataaaatcaggaatatttttgtaattaatcaggaatattctgtaattttcttttttctagtgtctttgtctggctttggtctctggatgatgctagcctcataaaatgagggtggaaacagttttccctcttcaattttttggaagagtttgaaaagaattgatattcttctttaaattttgatagaattcacagtgaaaccatcaggtcctgggcctttttttagatgagagactttgtattactgactcaatctccttacttgctattggtctattaagattttctatttcttcataattcagttctggtagattgcatgcatcaaatgaatttrttcattttattttatttgtttttttcttaattagtccagcaataggtctttcaactttatcttttcaaaaaaaatcaactcttggttttgtttattttttctagtctatttctgtcctgatttttattattttctttcttctactaactttggacttagtttgttcttgtttttctagtcccttgaggtgcaatgttaggttgtttatttgagatcctcttttttgatgcaggtgtttattattgtaaacttcccttatataactgcctttgctgtatcccataagtttgttgttttccaattttgtctcaagaaattttaaaattttcctttaagttccttcattgatccattggttgtccaggagcatgttgtttaatttcaatgtakttgtgaattttgtgaagttcctcctgttattaatttctagtgttatacccttgtggtcagaaaatatactttatatgatttgaatcttcttaaatttgttaagatttgtttatgtcctaacatatgagctatcctcgagaatctttcatgtgaaattgagaataatgtatattctgcagctattgaatgaaatgttctatatatgtctattaggtccacttatttgagaggatagcttaagtctgatgtttccttattgatttcctatgtggataatctgtgtactgctgaaactgggatgttgaagtcctctactatagttataatatagtattatctttcccttcatatctattaatatttgccttgtatttttaggtactttgatgttgggtgcagataaatttacaatgttatatccacttgctgaatcatccctttatcattacataatgactttctttgttcattttcatagttattaatgtaaagtgtattttatcttgcataagtataggtattcctgctttcttttgttttttatttgcaggtaataccttttctatccttcactttcaatctatgtgtgtcctacaggtaaagtgagcctttgtaagcagcatatagttgagtcttgtttttcatccattaaggcactctacattttttgattctagaatttaatgcatttacattacatgtagagacttgttaattgttttctagttgttttgtagatcttgtgttacttcttcctttccttttgtcttcctctgaggttaagtgattttcactagtgttatatttggattccttcttctacattttttttttttttgagatggagtctcgttctgtcacccaggctggagtgcagtggcacaatctcagctcactgcaagctccatatcccaagttcacrccattctcctgcctcagcctctcaagtagctgggactacaggcacctgccacsaagcctggctaattttttgtatttttggtagagacagggtttcaccgtgttaaccaggatggtgtcgatcccctgacctcacgatccacccacctcagcctcccaaagtgctgggattacaggtgtgagccaccgcgcccagcctcttgcttctattttttgtgtatttactataggtttttgctttgtggttaccatgaggcttacaaaaacatctcatattcataacaggttattttaagctgatggcaacttaactttggtcacacacacacaccctactgtatatttttaatccacttctctccagcattttctatttttatatcaatatttacattttaatattgtatatttcttaacaaattaatgtgggtattatcatttgtagtagttttgtttttttatcctacattacaaagatataagtaatttacatctttttccaagtttgaaaagttttctgctactattttttaaaataagctttctacccttttatctttctgttctccttctaaaacccacaggacttgaatatttgctcttttggagttgtcccataaatcctgtattactataatattagaatattctgaattttactttgtacttatttttaccagtgagttgtactttcaaatgtttttatgatactcattagcatccttttctttcagctagaacttcctttagcgtttcttataagacaagtctggtggtgatgaattccctcagcttttgtttgtctggaaaagtcttaatctcccttcatttctaaaggacagttttgctaggtatagtatttttgtctggcaggtttctcatttcccttcagcactttgaatatgtctcccactttctcctagcctgtaaggtttctgctgaggattctgatgttaaccatattgggactcctatatatggtatttgcttcttattgttgttgttgctttcaggatcttctttttgtctttgattttaatagtttgattattatgtttctttggctattcttatttgggttgaatctgattggagatctttgactttcatgtacctggatatttacacctttttccaagtttggaatgtttcctgctactatttgtttaaataagctttctacccctttatcttatttttctccttctaaagcccccatgacttgaatatttgctcttttgatgttgtcctataaatcttgtaagctttctttatacttctttattcttttttcttctttgactgtatattttcaaataacctgtgttggtgttcacaatttctttcttctgcctgagaaattctgctgttgatgttctctattgcagttttcattttggttattatattttttggctccagatttctttttaaaaattattttcaatcactccattaagtttcttgttctggtcacttattattttcctcattttattaatttttttttgcattttcttcatgtttgctgggattccttaaaatagttattttgaaatatttggcaggtagttcacacatcttcatttctttaggttcagtcactggtaccttattttatctcttagtgatgtcatgtttccctgatgatttttgaccttcatcattgtgcctcaatccctgctcagttgaataagtaagtccttattatagtcttcacagactggattttcctgggaaagcactacggcaggtgtggtactggggcatgccagaagcctggggcagctgcagccagagtgacattgctagaaacatggtatctactacatgggtattacttctgggtgggccagaagcctaggaccactgaggctttcccattgctaagggatgtccagagcccaggtccactaatgtcaacctaatagtggtgtgtgcctgagatcagactggccaagcaagcctgtagccttgagctgtgtggtcctatctgccatcggggcrtgtgtagaggcttagtctgtgggtaccagcctggtatatgggatcatgagggtctgcctagtgctgggttttactgtggcaggcccagtgttggggtccaagtcaaagtcctatgcccacttccttctcttttccccaaatggatggtatatttttctgcactgtgctgcttgggatgggggaaggatgatatgggtaatataatataaatttgtcctgcctactycatttaatgtgccttttattattattgtgctacagctgagtattatgacatctcacctgatttccttagctcttttgaagctattttcacatatgaatacttgctcaaattgatgtttctgttagagaataatcacaagagagtcctatttcattaactggctttactactcctcaccctctttgaaacctgccaatgcactaactagcagtggacgaccctggcctttcgtgatattggcaccctatcctacccatatctatggttgtagaggatttctatcacatgtttggaatgatcagtgagtaagagactagggtcattttgagtgttggtttgccatttgcacaaaaattatagatctcacctaaacaaggaaattattggagttgttaggtacagtgactaaaaatccaaatgccatcttaccaacagagcactggccccttgttgtctttctgcactctggggattgatggtatcctaactttgagaaaatgccagaaatagggacaaggagagctgctgaaagggaaagacaaaacctcaaacaggggtccatttctgacagcaaataaagagggtcaacacgaaatytggggacaccagtaaacaaatgktwtattaacmtataacattatgatatatgcaatataatattatgaacatttccagtctttatggcttctatcaagttttcaaattggaacaagcaactttgcagctgaataaaaaattccatcttgtgtaagcagtaattggttaagattattaactttttgataaagctatgtaactggcattttcttctaaacacattaaggtgcaaatattgttcaccagccattcctcagagtgaaatatttggcagtaagactggaaactatagaagtctgagccaattgcaaccaaggtttatctaattccagggctcctattaattcctttttagcatgctttcttgctaactagaataattaatactggacctcatgttacttagattagaatcaaggagttgtttggatatcaacagattttgattcatacagtttgaaaaagactttgaatcatttctcactgttcaatttcaaaactccagaaaggagatcttaaattcaataaaatgatcaggaagaataaggtcctctccagaaagagaaataataatgctctaagtatcttaaagtatttgattatagatgctcatttattttccaatgttatctctgtaacatatcttttacttaaggctaagatacaaatccttatggaaagtctgtagaaagttttgctgcttaaactctgatgtttatgtggctataaatcacagattttcagaactggtggagacttcaaagttgtctgatctgattttttcattttgtaggcaataaatttaattgttcccctaaaggacacccatgtacaaagacctccaggtgacatgtttatcactgtatttctagggcttagcccagttcctgacacatagtggagctcaataaacatttgttgatgggtttactgattgacagaataaggctcacacacctaattagttgtagagatctctgatcttctgggtgtcagtctgtgttagtctgttcttgcattgctataaagaactacctgagactgggtaatttataaagaaaaaaggtttaattaacaagtagttccacgggctgtacaggaagcatggctgcgaggccacaggaaacttacaatcatggcagaaggtaaaggggaagcaggcacatcttacataacagagaaggaggaagagagcaaagaaggaggtgctacacacttataaacaaccagctctcatgagaactcactcactatcatgacaacagcaatggggaaatccacccccatgatccaattacctcccattaggcccctcctccaacactgaggattacaatttgacatgagatttgggtgggaacacaaatccgaaccatatcgcagtcccattgtccccctttacaccagttaaagtattattacaattcatcctagttttcagggaaaaactctcaagtgtccaaattagcagttaaaaaacatctgcagccttttccattaaccaaaacccaaacaaaagggaactctgtgttggaacccatagattcctctctccatagttcctaaagtggagtacttccgcatctctacagaagacagggagatagtagagaggacatcttgggtctctttatctacctacctacttggtattagggacagtaaagggtttggtttccatcatacacttcacagaaaagtaccataaattctcatcccacttgtacatctcccgattccatttttttggctttatgggagactttcagataaatcccttaaatgaggcataaggcctctgaaattgttactcaaaattttttctttccataggatcaatgacataagaagactgtgacaactggatatttttcttgagatatgataaagctctacatgtgcctttccagaggtaggctgctgtcactatggacacatgccttctgctgatggaaaggtactaaaaagattttggaaattcctagtctctttgccctgtgctggaatggtaatccagctgtcttcgaagaggcttggatgcatgcagaattactctggatccactttgatcaycaagctggccagcccagcctaatgtagtctggggcggtagcctaatgtagggcaggaaagcttggccagataatgcttaaaattctattaagagatggcgtaaagggagaaagaaggtttttagagtgcttttgtctcctgctcctcagattccttctcttctgaaagaataaaaatatgatgctacccagacaaggaaagaatcccaaattttgacgttaagacacccagaaccatgacctctgtgtccctcctgacagtccacctccctgtgcctggtctggtgagttcctgctgctcctttttgcaagacaatgtgctacagcaactgcacaccctactcaactgtttgcagaagacagcaaaggccctgcagtttacagacagcactccacttgaagactgttgagtgaccatctttgctacacagctttcatttagaggctgtacgcctattgcccactgccttctttcaaccaaacgtggtttttcctcatggtagcttctgggagaatatgacgtttgctagtttgtttcctttgtgaaaactgggttgtctgtggaaatatcttttactgcaggtgggaaaacttcatgtgaaaagttcatatctgtgaagctacattttgagaaactctctattatactgatttttccatggtatgctctgattccacctttaaaatctctctaaagacagtggttttcaaggctggctgtacctttgtctcatggaagaagcttacaaacagcccatggtcttccctagatcaattaagtctgagtttttgagggtgttagtcacccaagcactgacatgtgtgtgtgtgtgtgtgtgtgtgtgtgtgtgtgtgtatttctgcctatgcatcctcttgttactgcttttgctgtggctttgtgaggacgtgacacttagaggctctgcaaccagtttggacctcaaggggagtgctgacaatactaagattctgtctgaaagccacacacagcctagttccagagtcctcaaccccaataattccttcccccttgatccatcatctgtttgtcagatatgctgaataaaaccaaaagcacttgccacacatccatgargccaaccctggtggcagccttctagtaatttcctattggccataggataaagtgcaacctcttaacatgactgagaaggtcatatgggctctggctgctgccagcctacagtccatctgtcactactctttccaccccaggcttcacagtagccattgcagcacatcctggtttctgtacatgtccatcctctcttgaaaactctcccctccacttccaagatcctgtcaatgtccacccacctttcagtcaacagcttagacatttctattccggaaagccttccccaacatcctacgttgaattaacttcctcctctattttccccaagcacttggatttgatttatcacaaagcttattgttctgcattgaaattttttattcattcattcattctttcattcatctctctctctgcactgtaacatccctgaaggtaaggactatgctcatcttgttccttgctgcatctccacaagggcatttgtaatacaaacttgtagcacaaataattaaaagtgaggtaaacttagaaaacaatgatgctaacaggttcattggtttatatgggagaactaaggggcacacagtttttgtgaaataagtcaaaaggttctgcctttcaccatacatatgatttaccacaaagggtaggtgaagtggcctgtgatcgtgcacattgaagacccaggtaacatgatggggatcacaaattacctgatggttttgatcatgctgagacccatttcaacacagcagtgggcatggtcctggcggggctcaggaagtccagacacgcagtagtagcagtcccccaggattttaatacgaaggcagtgatgctcctggaaggaacaggataagagggaaaggtctatgtcagcagaaggatcagttcttcagaaaggcttgagaaagaggcragcagggttaggtggtctgcaacttggggtaaggagaacctrcctttgaaatatacttctacctgtctttctaaaatatttgaggtgtaacctaaatgggggtttgaaggacccagaggtggaatggaatcataaagaaattaggttttgagctcaaaagctacatggttatatccaagctttgctatatactagctctatggtctgcacacctgtcacttggtcaggcctgacagagtgctcatagtatctcctacaaattcagccccaagcaatgtctctcttctcaaaaacagctgtgaattaacagctttcatcagtctttagcttaatagtaagcacttaaaaatgtacatcacttaggaattcctattacttcaactctataaagttcctttccagcaaggacatttgcactttatgaggaggaactaagtcttcttatatatccttttattcgtttattaatttatatgtttgttcattgaaaaaattaaaaatcaattgggcacctataataaggcaaacattgtccctaacccaaagatgactaataatagctcctattatgcactataaataaaacagagttaatcctcacaacaaccctctaaggtgggttgttttwtatctccatttcaccggtgagaagtagttgttagtttggtggattcccaatcttaaagacacaactcttacaaaatttcaaagaacaacaagcattaagaaaataatgcatgcttttatattggataggaagcagctagatgttataggttctagtagaaagagaacttaaggtagtatagcatggggagccaagggcactggtttacgagtcacactgcacaggatcaaatctcagatactgcctctgtcttttctgtgagtctttgggtaaactacctaacctctggccttcaggtgcctcatctatcaaatggggataatcatagggcctgtccccttgtgccactatgagggttaagtgagatggtgcaagtgaaagctcagtacagggcctggcagatggggcactcaattaatattgcctctttctatgaggaagagttggactccaggcctagctccttcacatatctgtttttcatcatggacaagtgacatatcctcttggtttccttgggcagcttgttggggctgaatgacctctgagatgccttctagatctgaagtcctagaggcttatggttctatggctgtgtgggaaaaggagggccccagagctggagaaggggagttattgataaaaagtacccactgagagaccaacagtactgttgatgcccttgtagtagcaagctgtaaagcactgtgttggtttcccaatctcaccaggagttggacattatgtttgggtaatggataagtaaatatactatcccaagaaaaacaaatattagacagggaaaagagaatcagaactgtctctggtactttcccgtcagatttctggagccttgtcaaccttcccaaatgggcccagatgcaatcttcagaactctgacagcatgtacagccatcccaggattatttttaggggatctgggctcctgtctattggctgcttcaatgcagctaattttgcaacacagctgacaattaggtctgattcattaaataaaagaagcttaaggccttcagttgtttcttctaagaccttgagggtgtcaggatcagaatggaacttagaaagtttcttgttctttggtgctagcagtgcccagatttgtggagtcagtgggactgttatggaaaaagaaatcagagggtttagagatgttgtagggtacattttttttttttgtcaagaaagtatgaacaatccatcaacaaacaccaaaaacagcaacccaaatactatctactatccccatcacttataaaagcaaatatatttttaacaccagaactactggaaagacatatcttcagaataaaggcaaggttttctttttacctaaataaatttaacattatgaaaactcactacattgcttttatcatttttaaaatctcatgccaagtttaaaatttccaatttttgtgtatgaaggagaatttgagaaccagtgttccaaaatcttactctgattttgcagatccgaacactgagactggaaggcagggattggtgacttcatctgcaaatggtcttttggggcatcgggttggtatgagagacttatgcgaaagaaagcctggtaccatcaaaatcagatgcatggattggcctgttgcctgtttgctacagggagggatgagggaaaggggcataacaaaaattactttggtctaagaatctgacatctgcattccagagaaatttaccagctgtttgaccttggataagacactgaagccactgtatgtgggtttcaattcctcatatgtgacaagtgccaaaataatctatcttgtccttaatacacaacagagtaagcttggccattacttaacaatgacaatgacaactgacacctggaagtagccttctcaatgttcaacatgctgctccttatcttttttcgttgagcttcacaataaaactctgaacatggcagagcaggtaaagtcacgtctgttttacagatacagaaatctcagtggagagaggggaagcttcctgtgctacagaggagctagctaacagtaacaacctgggctggatgtcaccctcaccaactctgaatctgtgatctttccctgaaaacagaggtgaaagcactttggmaaaaatctaagtggggacaggagctaatagtcattgagcatgtactatgtgccaggcaatgtactaaatgcattacacctatctcagtcttcaggaccactttctaagtcacgtgtcatcttacggatgggaacagcaggcttgagggaaaggccacacggcaagtaagaggcagaagaagaattcaaacccatgtttgtctgattgtggggctccatgctctctcttggcaaaactgcaggaattatggcaaagtccagaatggtaggtctcctgacaaaagtgtgttttagaaggagattgtgtaaaatagtttattactcrtctgaggcagacattggataatgatgtgatgatgttcacgtccagggtttgttattcttccaacaaaatgtggagctggtagcctccttgraactctttggatcccaaatacatggttgtatatacgcatatatattatataaaattattttatacaaaaaaataaaatgtatgtaatatatataatacattaaaggcctggattcttatctgtcaaggtctgtcaatttgcagacacatttttctgatcaaatactatgagctgtcagatgacttgacagtaatatctgaataacttatttgtaccagaaactaccttgaaaagatcacataaaggaagacagmctrctttggaaaaamatattcaaaaagaaaaataaagtagggtgaggatcttcttgaaaattttattgagttggccttattgcaatcctttcctcttgtcttgatgactttgacattatcaaaatcttggaaaattcccaagagtttatgaaactgcacatacagacaatagacaaaaattaggagatgaatgcaccaaattatcaaagatggttatattgttcacagggtagaatcacagggatgtatactttgcattgtgtacatctttgatgtttgaattttatgtaatgaacatgtataactttaataagcagaaaaactcaatacaaatgaaaaagactctcaaagcaaaaacattagtgctatcagtgtacttttctaaaaagttagaaatcccaaaaaactttatagtattttatctaattgtaatcacgtaagtagtacgtgaatatattgtcctagtaaaaatgaaactgtagataaggttgaagttccctaggatggcctcttctcgtcagacacacagcaccctggaagcctggtcttcctgccctctccgtggaggctgctatgyattcacatgtgattttcccttgccagattctgagcatcctgaggggaaggactggttttgtcttttcagtcttgcgcagtacctgaaaaagtaccctttctctttctctgggtcagcagggtttactgtgacaccagaaatgcaccttaatcacatctgccaatggcctttggatggccgtttttgttcatcttggcatctttgataaaaaatatcagaaccataataggaaatggaatagctatgtgtaactgataccaaccaccactgatgcaacaataaaaggaaatggtatacatgttttcccccagtccctagccctccagctaaaaccaaccctcctattaggaggatccctcagtttccacttcctcctccgcccccgtcagtctcctagctagtagctgttcagtagctgaaatttatactaaggttgcttgacaagtccctgcctgtctttctagcctcatctccaccacttcctaccctgcactttatcctctagcaatctcttctggtttcttcacaaatacagagtaacatctttatgcttgttttctcctctgcataaaatatcctgctctgatttctttgccttgctaattagtgtataaattatgtataataaaatcaccttcttgacaaattcaaacccatgtctgtctgactgtggggcttcatgccctctctctacaaaactgtaataataaaacaaccaccataataaaaatataaatcagctatgtaatcccccaaatcaccccaccccatgctccattgctatccatatgcttactccattcccagccctccttgcagctacttatctgttttctgcctctgtaattgtaccttttataggatgtcttgtaaatggagtcataaaatacctagcattttgtatctggtttctttcacttggcatactgcacttgagattcattggtgttgcacgtaagagtggataatcctatttttattgctgaacagtattctattgtattatttatatcatttttaagactcagcttaagagtcactttcttcaagaagtcttctctcatctaaaggtcatgtgttacctctgtgtttccatggcccccagacttaccttcctcataacacayggcacattttacattccttacctattaatgaatacctaactagacttaattccaggaagggaggaggtgtgttttcatcattctcatattcctaacacatagcagcatgtacaatacctagtaggtgcttaaatgcaagtattaatgtatttcccatagagtgaggcagccttaacagaggacattttgatgctctaaaaatgaactcccaccgatgtggtcttatttaattctcattacagctctgtgaagttggcactaacatacacactttacacagcaggaaattaagatgtctatttgaacccaaagcccactctgaagtacagcgtgataatgatattacttcgtaactcaagtggctttaggactatgaatctgtgttttgatagcaaatgtccatctcctttaatctgttttctagcttagctctgatcaagacagctggaaaatgaaggtactgtcttgttggctaaaaacaaagctcttaagttaggttgatcaagatggtggtgggatggcccagcagattactggtttttgagaacatgctaattcatcccagatggccagggttggctgggaaactgcaggccatcattactgcatgcatgagcactgaagctgcagctggatggcacctggccacgtgcaaggggaagcaatgataggggcgtggaaagcagataaaaaggactggggtttgattgtcactcaaccagccgtctctcaattgagaaaattaatctgacaaacctcctgcatgagacctgtaaatagctaacatcagtccccagaatgtgagagggtcagggtccatgcctagggacaggatgcagaatggtaatgacattggggaagaaggctgaatccttctctttccttattccatatgcagtccctcactcctgcaaaagacgaggaggaaattaaattcaactcacatgggccagtcgatcaaatctggcaaagagctcgttgagcatcctgaccagctcctgagcagacaaggtcgtggagaggttggtaaatcctttaacatctgcaaaaagaatactaaacacagggaagagggtgggggtggggggaggaagtatattaatattttagtccatcttgggatacacatcaacaccatcccagcagataaactgtctttgtggtctgagattttagctcttgctgccatgagagtcaggaggaatgtctcagtatttaataaatatctcagcagagagtccactcaggagctcaggaaggacaaggggacaacaggaagcccttttttcctgtgcagggctgtgtagagtgggcaatgcaaacaatccaaaagaatttgtcaccatgaagatatcaatttcttgtgaaaagcaagatgaaactttatgaattatctccatattttcacaatgaacagcaatgcacatgcaatgaacacagagtaaaatggtcacaaggggcaggggcagaaccgaaaacctcatcatcttgaacccaatgacaggtaccgtacccaaaatggcaggtaaataggcatttctcaaaaattatgacaataggtggcaaatctgggagacctcaggcagaataattaatttcccaatactctcacattactaaagatttcagttaggtgaggtcttgttctatgtatatggcctggtataagggacagggcagcttcccaaagccttctaaaagccaggttactctcttggttaagccatccagttactctgtggggcaagcatagttctctccattcagcccatgaggaaactgaggctcagagatgcaaggagacttgcccagcatctcactagtggcacatggcatagctgggattgtccatttggttgaattgcactgagggatattgctccaattatcttaccatgtcatctcagggacctctgaaaggaaagataggacacaaaacaggataccatatttgatcatttctcatttttcatcctctctgaaagtgagatgtgtcttacaattgatcactttagctgtgtcgagctttttacatcttttcttagtgttgcctaaaataatgacaagtcttacaatcagcctatgagtgtaatttagttttaatgaaataggtaattgggctagaagacatcgtggaatgtgttgacttacatcagtcaccacatttattcaataattcttaaaattcatctcctttacaaacccttttaagaatttgacatagactatggattatctctcccaaaaatgtacgagcattcaaaattttgcacctcacttaaagggatttttaccttccgcaaagtccattcatgaaatcattaggaatccttagatctattgctttagttaattattgaatggctcattctttcagcaaatatttatatatttactatgtgttcagctaggcactggactagaaagttagattaaatgatatataagacctagtgcctttcctcaagatgctgagtctgaggaatggagctggaaagacaaaaagaaaaatggaaacagtgcagggtgatgatcactgtgattgaaggacatattggggggtgaccagccacagagggatcaggagtctcccagtagagaaaagtctcagctggttcttgaagaatgtgatgagcgaagtgattgggaggatggatgctctgagcagagagaacagtacattctagggtctggtggaagaataagtgtatgtatcaaggttctgcagtaattcaagggcagccagtcagaaggtatcactgagcaaggaggctagaaagaagagagagatgaggtcagaaatacaggtggggcaatgatggagaaggggctggtaagccaggatgaagaatgtagactttgtcctgaaagtgatggaaagctagtgaatgggatttaagcatggacatgatgccaatagattttcagtttactaagctacctttggcagagtgactatactgccattgtcttctacagttccgtggtggcagaacatatggtcatatgcacagaatttgagtctagatagatctgggttcaaatcttagctcaccacttaggaattctatgaccttgggcaacttcctgaacttctgtaagccctagctctgtaaactggagataactggcatacttgcctcattagtgggtagtgtttagcacatcacctggcaattgccagcatagtaaatgttccttaaacgtgttagcttttgttatcatcattttacaaaattatactataattgcatgttatatttgagagagaaagagaagagagaggtaacagaggtagaaaataatatggccattcatttgattatgtattacttgtagctaaaagcattcctaactgttgatgaagcctgaactgccaggcagcagcaacacttacagagtattcactgtggacttggtaatgctctgagagccctacatgtattcactcatttattccatgtaacttatgagggagaacctatcatgttcttctccattttatggaactgaggcctacgtatcttgcctataatcatgaagagctagaatttgaaccaggaagcctggctctggcatccatcctctttattgctcagctatgctmtttttgaagaaagaaaagtcattgctatgacaggtgggaagtggacaggctcttagatcacttggtttaacacattccctttatgaatccataagcccaaagctactagtatccatctgtctatggcaagaatggtttaccaatttatttattcattcaacagcttattaattaaatgactactatacaccaggcagtggagataaagtagtgagcagatgatagcatcatcccagcctttataaagctcacagcctattgaaagaacaaatggattccctgagagctaaggtcataaaagtttcagatgtcttcagtgttccaatatcatcaaacttctccaggtctttcgatcccaccatacattatgcacctgtatctttgtacatgctatgcctgctccctggtatagmtttttcccccttttgctacctgttaaaatctgacttgtccttcagagccccactcaggtgttaaaatcatgttaagagtctatacccctctggagacttccccaagcatagccagttatccccaactcaagcttctcgccctgttggtgcccctctctgtcataacacttaactctcaatagcacaatcatatgtggctaagtgtgctccatctattagctgaagaacaagaatgaagtcacctctgcatcccacctgcccagcacacagttggccctattacatgtttccttagtccaatcaacagaaacattcagaattaagtcctccttcctcagagcatggtcatggcccccagtggcatctcatgaaattgttagaaatgtagactctcaagccacctctccagacccactgtaccacaatctgctttaactgagccgtagatgatttgtgtgcacatttaagactcagaagcactggtttaagtcatagttgtacaataaggatttattgaataaaagaccagaagcagaaaccagggccctggttctcattccattgcttgttctgccacctccaggtgctgagctcagatcatcaagtcttttgattcttggcataatttgtagctttccaggatgaatataccaagggggccatagtaattttcaactctaatttagccaacttttagccaaataaattgtttatttggctaaaaataagtcatgttacctaatagtcactcttcaaatagaatccccaaggaagcttttgcggagttcaatagaatcattaggaacgtggtccctgtgtagactcctctcactaactaagtttcagatgtgttcggtgttccaatatcataactgtgtgttcttgggaaagttacttaacctctctgagcttccattttccttgataatacagcaaaggtcattaaagctactctgtaggactaccataagaagacaacttgtaaatcattgcataattctcaataaatgaagggtatataacctctttgggaagtttttacgaatctggaagtgcttaactgccatgcggatggatctagaaagtcatcaagttctctagctccattcaattgcattttgcttgttcgtgaaactctagtctacaggacagatgtagtgatcacacatgttgacagggctggctggaaattaacagccagtcaagaaagtgaacagactgagcaagactctaaaaacgaggatttttttgatccttgacaattggtcactaaaatatctaccatggcatagggagagataaagacaaacatgtctcccagacagacccacaaaatgtatgtcagcaaatgtgcaaatgtacatgaaatggaattggcagggccaataggaaatgggaaaaagaaccatgacagagaaggatgactgtccaccagatccatgcctctatttgcatagtcaatccacctgtcactaggaaaagccattgagccagaggcactgttcccagcccactttgtttctaggtgggcacctggaattgattctccctaatggaatctgaacagaaatgacatacgtcattttctggttaaggtggaaaaaaaagtgggtgtgagtactctgcttccccttccaataaccaaatgctgggaactttgaggcccaagggatggtagttacaaaacaaaggagcctttgttcctgaatcacccactgaccagtaatatcagcagtgaacacttgcatgaataaacttgattgagttaaaaatcactgaaattgaaagggtatttgaaagagcagatagcattaccctaatgaatacaagaagtgtcttaagtatctgggggaaaaacaggaaagatcaatacaatcgggtaggtgggatggagagcgtgaatgacttccagtaaaaagctggtggccaggtggatcctcaggtgaacctggagaagtctcagaggttgatagctgaagtcaayttgagcgttcaaagagtccagcttttagattgggaaacggaggcccacagggatgaggtgatgcagtcgaagtcttgccaagggtgtggctaccccagcccacgtgggcacacgaatgcccccaagcatggcgcctttaagcataccctttcctgatgaaggtaaacagtggtatgaaatgtaagtcaagacttagatgtgtacagcacttttttaggaaagagtcttcaaaattaaaaaaaaaaaaaaaaaaagccaagggagaaaaaataatgcaccaggcagtttaccatgaagagggtgacgggcttggaaatgatttcaaaaatgctcccaacaccgcagcggggttgctttgggggctggggaagcgggtggagcagccagttggctttgttctccgacttgggctagggaccgtcctcctctgctttcaaggctccggtcttattttagcaccctgcagcctcgcagtgggcaggagacgccccgccgccccgagctgagttcatcttcccgaaacccccggagccgcgggcatctcrccacgctgctctgagaatagcccgggagcaacagggccggcggctggtttctgcatcaattctcctccccctagtarcggctctgaaaacgcggagacacggagagcagaaaacgaaattttaatgtactgtggcgtgaacttctggaaaagggtctccagcacaagaactcagttcaatgacttaaaataaatgggcggggttggaggggtgggggcagaagaaactagctgcttaagagtaacgggagcactgaaraaggattcctgcagaaagcgagccgccgaacatgctgtttattgcacttaaggcacctgagcatgttggtgtggacgcgctggcttgttgaattttccttatttttctttttaaaggtatttttccctccttctttctccatggtgacaggtactttcatcatatgccacatattttatttataaatttatatgatttgtatatatttatagatgagtatgtaattaaatatttattttttccccaaatattcacgcaatttctgctttctctggatctgcattcgtggtcaagccattttgccaccagggaaggaatatggaacaccacctatgattctctgcatggaccgtggctctgccttcacttctgctgacccctttgctcagaattcatgtatttgtgtttttcacttggctgacttcgtctcaaataaagccaagaagaatcatcatctcttccaggaaggtttctctacctatctccctgtcccgccctccacctccttgccccaggttttcctccttttatgatctcttggcatttgtggcctgcttaataatcaaaccccatattctattatgattaataggttcctattgtcttagaactagtattgaagagttcttattatgtgtgggaccaattcctagatctggggcgcatctcttcctggaattgctgtttgacaaagggctgttttgcaaactcaagcatctaaatcagtgtagctcaattcttggacaagaccctgggaatgacctatcctgctgtgcccgctgaagggttgtgttagaatcatgatctctactgaattttaaaacgcgtgttcctgcatgccaggagtagaacacctacagatgctgctaagtgcaaaattgtcctctatcctgctgacattaggaggaaaggaactatgagaataggtttgtcacttttgaagttgcttaatgtaaggactctgactctatgtttgggaaagttttaccttatgatatttggtgggtgggagatacagttccactgtataagctgaaaatgccagagacttgctttccaggcacttaaagaaaatgactgggctcagccaatcagacccatctgctccaggctttaatttgagatgcaaagaagcagcaggagcaggaagtcagggcagagcaaagacagcaatgtcagtttctggggctgcaggaggaattgcagtggtggccgtgtcagggtttgggggctggtttggggacagggaattgcagtggtggctgtgtcagggtttgggggctggtttggggacagggttgattgcacaagcaatggactggtcagagacagtggcagtggcctcctaactggcctaagtgctctggcttgattttgcctatgcctttcactctgtggccttgcttcattctggcccatttccctcatgtacttctccattcttccctaactattctgtaatccatgacataacctttcaaaacgtttattattattattttttgagatagagtcttgctctgttgccaggctggagttcagtggtgcgatctcagttcactgcaacctccacctcccgggttcaagcaattctcctgccttagtctcctgagtagctgggactacaggcatgcaccaccatactcagctaatttttgtatttttggtagagatggggtttcaccttgttggccaggatggtctcgatctcttgacctcgtgatccgcccaccttggcctcccaaagtgctgggattacaggcgcgagcgaccgtgcccggccagtacatttcttttaaatcagtcatggttggattcttttgactgaaactaggaaacatgtctgaaatgaactacaatgtaccgaatgctctactacttgcttaactctgcctgttttatattttgtattaatattcacttatatgatccacataaaactctgcaaagtggctaagatgcttattttacagggaagaattttgagattcaggtaaataaatttcccaagatcacaaacaaggaataggcagaattgggattttaaagcttgtgtgcctcaccatgcagttcaccctttgattttcagtacatgccatgttgtccagtgttgtgctgggcacatagagggcactgatgcatggatgggggagtaagtgggaagatacatggatggatggatagatggatgggtggatggatagatggatggttggccaaaaataagtttgcaaaggaaaataaactgtcatcctctttgtactgttttaaacacacttatgagtaatataaggaggggatgtatgtgatcacacctgaaacccccagattacattctgggattatttttcttatcatagtctaaaaggtgtttgcctttcccactcaaaatgtaaagacagacacgcctactgtaggagagctaggcagtaagtcaaccagcaaatataattttatctgtgacattcttctctagccttaatttggaaatgtagaactctctgatgaataatcactaggtaatgaattaatcaaccagatgaggaaaggtgctgacattcaagcagacggaagtcacggaagtgcaatgagagcacccaaacacacatggatcatgcaagagccggggcaagggtgttgtgtttctcacctgacgttctcatagcgatggatgtagatccgatggaactggtgctgcaggtgctcatcttccacattggtcatgtcgttgatcatttccaggacaacaaaccgggggagcacagaaagcacgagccgctcctggaacaaatgaagagggacggtcctgttaggctgaccagcgagtctcagatgggagggtggagggtggagaagtcatggggcttttggatgaactccctttgggattgctaatttcataccattctatgaatacaacaaatatttattgagtacttattatttgccaggcactctgctggtgttggatatatagtggtgaaccaaatggatgtggttctgactctggtggagcttacattctaataaggaagatacattaagtattacatacccaaagatacctacacacatttacaaaatgtgatgaatgccatgcaaaaacaggtcatgatgagagagtacaatggttgatgacagcgatgcatatcagggattaagaatggccttaccaaggaactgatatttaaaattgagacctgaaaatttggaaggagtctgtcctgtgtagtgcaatgagaaatccaggaattaaaaataataactacaaatatcctgaggcagaaatgagcaatggtgtggctggagggtggtgatagcaatgaggttggaggtgtagctagatcttgcaggtgagcatacaatgtttgtgtttaattccaactacaactgaaagccactaaatggtactaagcagcagagtgacataattggatttatgttttaaaagatcactttggctgggatttggagaatgtgttctggggaggagccaaggctggaggcagagggaccaggtgggggaagctcctggagtgtccaggtgagataagattcatagaactggcaaccgagatggcaggaaagaaaaagggtgtgcccaccatgatagctagttttgactttagttgcctgggagagtgagctacacttacagaaacagcgaacatacaaaagaaaccaggcttacaaggcactagctctttatcaaagatgagaggaagtgagacgcacgcagcctgaaagtgggttcctaacaccaaacaataatatttctattgtgatcaccactgtagacaaaaggaaagtaatgggttaactagcaacatgaattaaattctaaaaagtctttgtgttgtggaaactaggcaagaggctggcttctgacacatggtttacttggttacgtggtttactgtgatagatgaagtttaatacttttagttgaataatagaaaatagggtaattatcattgatatgataataataggtcatgtggaattatctagttgaggcatatcactatagagagataaaatttttcttggtctatggtttactatagtgtcaaacagtttaagacaggcacgttctaatcatcacagttcctcatatctttgtagttatttatgggtattaagcattgtcaccattcattctttcatgtgtttctctcgaaaccctgacaatcagcttgcagaaataatcattttcatataatggacagaatgagtccaggagagattaagttacttgcacaacctgaacagttaatcaagcggcagttgcagggtacggtcctttcccttgttattcctagctgggattcttggtgagatgggaaaagtcttggattgagtctgatgaagaagtttagattccaactctatcattggatatccattaggtaaactatctcatctttctgtgccttagttccctaatttggcaaatattaatagcaataatatcatctacttcaaagagttgctgtgagaattcaatgcaataaaatatgtgaggggcctggcannnnnnnnnnnnnnnnnnnnaatgcaataaaatatgtgaggggcctggcatcaaatccttctccctcctctcacctctacttcactctgcctctcatgcaaaaggctttattaatgaaatgcccattgaatgacatatgatgaagccctttcttctcttgagtgctatcccatcacgggactaagaggcatgctttctgcaaatgccccaacatcatgtccattttgtgttcatttgtgctatttgtcaacttcccaggtacttgtggccctgctctctcaattgctgctgggtgggagtaggtgctaattacagctgtgaggggcactagtgctctgtcaatggctggggatgtttaattaagatgccactgcatctgcacttgtaagtgatagagctgtaatacacaatccacacacactccaggaccccacggtcagtttgtaaaagtgtttgattgcaaatcatccttacactagtgttgtattacagtgatgttttaataaccagagtgagaaaaatggaagaacttatgttaggaagagaatggcacaggagataaaaaggtggtgatgcagcacataaaatgatccaagtgtagggaagaaatgggaactgaagagagacacaagaaagctattcattcacaggacctagttaggaagatgttcctccctgaaattcaagtccatggacatatttataaggctatcccatggattctgtgatctgaccattcatcagtatgttttgaaggttcataaaagtgcagctgccctgaccccacccacacctactgaattggactctgagaaaaatggtcaagagggtggagtttttaaaaactccttaggtttttgggatactcaggtaggattgagaaattctggcctatcctgtggcaagcactactaagcactttattatactcaacctttactatagctccataaaacagattatgttccaaataaaacaaacacatggttatagtaaactgattacctagcaacatgagcacctagatcataaatagcaaagaattgaaaccaaattctcctgattcccaaaatagctctaacaactgcacttcctacaaaatgtattctaatcacttcttatctgatccacatggctcttagaaaattgtaaattaaggcagcacgtgggatattcctatgattggagctaacagtatgcaacaaagcctccgaggaggaaagaaccattgttcattaaggaagatgagggacgagtttctaaggagggttcctgaaaaatgtgtgagggttcaaacatttatttatttattcatctaacaaatatttattgagaacatactacatgtcagctcagttctagatatgggagatatatagatacatagagagtaagacagccaagattcaagagggagactttataggtagagactgacaggctcctggaatggcatggaaagatacgcattcttacttcagagctaccatctagttggctctgaagcaactactgtgggccagggactgagttaagagcttcatatataatttcatataacattcaacataactccatggcagaaataactcattgtagattaacaactgagaaaatgaagtctcggagaagtagtttctcaaggttatacagcaaagaagggccagtatctagtctatcagaccccagagccagttggaagcttccccttcaccttatcagaaagctgttcctaaaaaaatccctccaagccccattttcagaaattgaaaatgtaattaccactgcaattagtggtgcacaattatgtctacagttaaacaaaacatacacatgatactcaatgattacttaattgaatccttaatgcaaacaaataaaaataaaacagaatagtacagttaaaataaatcaatggaaata

SEQ ID NO: 97359 - DNA, 14256 bp, Homo sapiens
caattgggcagccactgggaggggcagccaccctaatggaggctttctctgaggtgttgggtcagagcatgtgggtatgatcttagtgggcctaaggcaggagtgggttgaaccaggagacaattcctgacagcgattactactttcaaatcattttctcagtcatgatgtcactggacatgccataggtcaattagcatgaggcagaaaggggttagggccccagagctaccgcctccagagcccagttagccccaccagtcacgcacaatgcttcacatgcacctcctcacttcctcctcgctcgattctgaggtcagcatcatgattgtcttccttttacaattgaggaaataggctcagaaaggctaactggccggggggatttgacctcaactcagctgtctccctaaccttcaacctaggtttagctgcctctcaactgcaggttcattacttcagttgacagatgtttggtggctgctggggcgcctgaaaataagtctggtgggggaacaggcccagccagatcattccagtcatgagtcacagcccaggtgcacaggtagaggtaagcctggctcctgggagagagatgtgggcaggagcattggctggaagccagggcttgtcattggacatcatctcggtcctgcaggggccctgtggggtgggtgtcatcaagcccgtgttacacgcctgtattggatgacaaattctaccaagcacacagccgaccgggagttcaaacgtgagtgtcactgtgaagcccaggctccacagcgactgagggccgtgggccatgatgaggcccgggaaaacaggagtgctgtgggagaggctgggggcgacttgaaatggcgcctcaagaccccctccgggaacccacgcccgcctgaccttactatcacctcggccggaagtgtctccggccttttcggaagtcactttcacctaaccttacagactaccgctccgccggaagtgacgcagggcagcggcgtcgcgggggcggggctcgggaaagacccgtgccagcgggcgtgtggccgcgggtttcgcacggtccaataagggagggcggcgtggcccggcctggtagcgacgaggacgcgcctgcgcagaggcggcagcaccaccggggttgactccgggggcgcggcgaggaggtgagcgggggccacagcccgggctggggggagccggggtgcaagagggcaggctggatcaggccgggcagaagcggaccgggctccgagtgtcaacgagagctaggtgacgaggaaattgggggtgggggccggagctgtccggagatgccgcagggggagggttctcacgccgcacggggcggagtcctgggactcggggcgggacgtggaaccgggacgggtgggacctccgagctggtgccagtggaaggcggagcccggcggcggggggcggagctaggagggtcgggggacggagcctggctcttgaaggaggagctggaggaggtgaaaggcggagcctcggggtcggaagcagagggggacggagcggaggcgctgggggcggggcttcagccggtgagtggcgtggctacggctccggaaaaggggtctagttctgtcgaaggcggggctgcaggcccgggggcggtaccgcgtcctccgaagggcggtgccaaggagccaagtgaggagcctggcccgagtaatggccccgggcgtcctcgcgggggtggtctccgtggtggccgggcttggggacgccgtaggccgagaactccaccgggagaggtggtgtgggtggagcgggctcggcggccagcagacacagggccagtctgggtgccccggagacccccaagggctcagagttggggcggcgccccgggcggaagcacagggccaggctggggggtatctcccgaggacccgggctcctcggagccacccagtggggatgtgtgggtgcctcggggccggccccctgcagcggccgcagaggtgttggtgtgctggaccgggggcagctgggtgtggcgtgagtggggccgcccagtcggggcaactgcagtgcagccagatagggtctggactttgcgtaaagggacaggcgggaactgaagagcggaggtggggactgggagggagggaaggtatgggggtgagcaaaggggcgggtccctggctgctgtggcctcccctgaccccctccccccgctgctggggtcctcggccaagcccccttctcactggactggtaagtgtggccccggagcccgggggagagggcggtgacccgggacaaaggggatcccccggggcaaggaagatacagtggcggtggaaccctcctgttacctacccgtgttccatactctccctgccctcccccacgttcagtcggtcggtcggggtctgtgcccacagagacatgaggctgagctggttccgggtcctgacagtactgtccatctgcctgagcgccgtggccacggccacgggggccgagggcaaaaggaagctgcagatcggggtcaagaagcgggtggaccactgtcccatcaaatcgcgcaaaggggatgtcctgcacatgcactacacggtgagtgggttgggcgggccttttgggagtgggtggggcttccgaggaccagagagtgcttgggagtctggttctccataagccaggtaggtgaccttgggcaagtcccctctcgcctctaagccagtttccatggttctgccttgcccttgcctactgcccaggtgggcaccagcaggcagtgacagtgtactgtgagctgcccaaggctctgtcctcttaaagaactatgaccagctgggcgcagtggctcacccctgtaatcccagcactttgggaggccgaggcgggtggatcacctgaggtcaggaatttgagaccagtttggcctcatgatgaaactttctctgctaaaaatacaaaattagccaggcgtggtggcgggcgcctataatcccagctacttgggaggctgaggtggaagaattgcttgaacccgggaggcagaggctgcagggaggcgagatcacgccgctgcactccagccatggcaacagagactccatctcaaaaaacaaaaaggactgaccaccagggctgtgggtgggcgtgggggggcagcttgatggggaaagcagctgagggagggggtgtcaggggtggtcccctcttcctcactggccttctcatggttccacaggggaagctggaagatgggacagagtttgacagcagcctgccccagaaccagccctttgtcttctcccttggcacaggccaggtcatcaagggctgggaccaggggctgctggggtgagtcatgggggaatgggcttgggagtgggggcgtgcatggccaccgcccaggaggtaagctgtgggaggcaagccccagggatacaagacaagggccctgggtgctgccatgggctgagcatgtgtcttcctgcaggatgtgtgagggggaaaagcgcaagctggtgatcccatccgagctaggtaagaggcccctcctgagggtgcagagcgagtttggggtgtgtgactgggaagggtgaaagctgcttcagcttttcattggtcttcaccgtatccattcattacaatacatgcctcctccaagtttggctgtgtctagcagtgagtacagggcaagatcattgaagcactcagctgtagtggccccactctgcccttgccaggcctttggcacccccttcccatctccattacccttctccatttctggccttcttgctgagaggggcggaacactctccctttgcccacactggaagggagcttggccatcactgactgtttctttgtgcatcttcaacagggtatggagagcggggagctcccccaaagattccaggtagtaaaccttttgatacctcccatcacctgcagccagcccacctccctgtggccctggttggcattttgactccccttctcccctacaggcggtgcaaccctggtgttcgaggtggagctgctcaaaatagagcgacgaactgagctgtaaccagactggggaggggcagggggagaggcccccatcagggaccagactgttccaaaaaaaaaacaaaaaacaaaaacaaacaaaaaaacacttaaaagcccaaggagtaagcctgtgtgtgtttgtgggccctgagagactcagagacctcagctccagcataccccaccaccttctcctttcccgactgtggagccttgggggtctaggctcaatgacatggtggcccttgcccagagaaaaaggagtgttcctgcctgccaacagcaatactgctccccccacccccacagctccccagccactttcaactcctggtctgggagccagcactgggctatcgtcatggctacgtggcccttaggaaggcctgtggtcacctggggagaagctgagctggcagaagtcaaagagcagtgtgcccccctaaaagagaccagccgagcctgttagctgcaccaaaggcgtatcctagctttattaaagggcccgcgccgcagagtcaatataaaaacacaaaaagtcccatcagtttaataacaataaaaaaccccaaaagtggaaaactgagggggcaggggaagagacccctgggccaggggcacgaggagccctgctcatggcaccaggcctggccgcagggtcccccggtattgctgttgctacgaggttggggggcagcgattgtcctgtgggagccaccgttctcctgggtcggggaccctcacttcttctggggtgtgctcagcttctgcatgccccggatcttgtccagcaggccagaaatgaaggcctggatggggtgggagggtaaacattaaggagaccagaccccaagatgacaggagccgggctcccctcaccctgccacccccgccagccccccaggaaatctcttacctctgtgggtttgtaacagtcaaccagcagctcctagcagaggatgggggaggaaggataagtgagtcctcaggagtgggggcctggagctcgcctatacccacttccaagagactggggccaccctgaggcacaggagatgccacaacaacctcacagctaggcattggccccattctgttgaggcaggagctggggcttgagggcctggctccacagcctcactttcccggggcagtgcctcaggcaacccatcgccccccagccccctcaccttgaccctggcagcccgggcatcgtcactctccatgtccaggagctcatccacgtcaatctccagttctgggatctcctcttcctggggtgggggtgggggaggagggagagacataagcctgagttggagagagggtgtgagaggggctctgggttgaggcccctgcctacctcggaggaacccagccctctgcccagcagacagaacagcagctgctctggggaggaaaacagatcaggcccgtgccaaggcaaactgcccaaagcggggtggggggggagcttcctgtccctgccagtgggcacggggggtgacagacaaggccagacagccagggttggggaccttgggctgggaacccagcagatgtgtctccccaacatccgggccccccatctcaccagagcaccggtgggtgcagctgtcccagcttatcatacccccctcccctcccccaaacacctgtcacagctccccgggagtgaggaggaagtgaaggctgaggggtcactgggaaggacccaggcctggcaaagaggaaacaaagagcccatgctttggtgagggaggggatgcccaccaccctgccacaccctccccaggaagcccctatcctgtttgtagtcagctgcattccagggctgggctagggtaggcaggcagcaccgggcaaacccactcctccaccctgccccccggggcctgagtcaccgtctgaacaaccagggagtcatgggggtggagaagcagagcccagaaagcgggctagcctgcacgcacgccaagatggagctccaggctagcccacagaacagcccagccgcagccgtcctaccagaccagcaccttgtaaccacagtctaacccagcgggcaccaggcggtgagacctcctgccgctgccagcccaggatagcccccttgcctcttgcccaaggctcaggctaccccttgaggcgtctggaggacactaggcttgacctggggagtggcatgatggggggcagggtccgaggcaacggagaaggcagaagtgacttaggtcaggcaagaaagagtatatattgggggcgggagtgcagaggggaggggagcgcgcggggaagcaaagcgccctttgactccagtgacaggcgagctcacagtggagctgccaggcggaccggcgcgagaccgattttggggtgtcggcgcggggtgggaacacacctggcagtcgtagaggcgcgtgagctgctccaggatccactcctctaggttgaggcgcttccgtagctccttgcggtcatacttgacggtgaccttcccttggcgcctcactgggccctcatcgtccgccccgcccgggccctctcctgcggccccgggggggctctgaaagtagacgcgtggtcctgggccgccactgccyggcccgggggccggggccgccaacgccgcgccccccgcggtgccgctgtccgccatggcggccgccggggccacgtgcgagcgtcgggcccctccctgcgccaccgcctccggggacgcccgccggctggctcgggttagctcgccggcgtccgctccgcgcggctccgcggcgagggcggcggcgggggcgcccgggggcagctgcagcattgcggagcccccgggcttggcctggccgcgccccgccccctccccgccgatccgcccgccctttgtcccccgcggccgccgcccgagctgcagccgccgaagcgctttctctgtctcgctcttcctccgccccccgaccacacccccttaaagggccagcccctctacaggcccctctcccctactccgcccccgggcaggggtaggggagggtctattcggcagggggtggcctagctgtccgtactccccaaacgcaaccttccagtcccaaacccaggcgttctaagcgctcaggacgacgatttgcgctcacgccaggaccctagtcttcattggacccttcctcattctgtcctcattgaggccatctgagaataggggctatctgagaatgcaggggagtggacatcgtgtgcagacagggagtctggtgaggagacgctgcggtccccgatgtccaggtcctccagccctcggccagcgaggagcgaacgggctcctccgcacggaccgacacgtggactgggctcctgggaaaggaagagtggagaaggcgggcaggagctgtccgggtccctagactctccgagtagcaggtcccacgcccccagcggaagaagccggggctgggggtgagcggtggcacccggccggcccaaacggccaaccccgggcagccaccgcccaccggcaagatggcgcgaggctcgggcttgtgggaaacggagtccgctcccggcgccgcccctcccccgccctgcggccaggccgggaagcgcaaagttgtttggggcgtcctctgcgcctcgcgacccgagtgcgcacagagggggaaactaaggcgcaaagagctgggcagtgcgggggccgcgacttataataataaaggcggtaattgcggctgaccctaggagcgtgcgtcgggaccgccgcccagtcggctccgcagagagggcgccgtgccggggctcctgcacccccgccctgcggctcctcggtccttcacatagccctggcccacctccaataagccgacggcgcatcccattccctccctctattttattttctgcatctttaaatggtctcattcattcgtgtattgtctgtctcccacttcyagattgtgagtgccacggggctgaggcctgcgccgacctggtctgctggtgctaccaggcttgaacagtcttcaaatccactgctattaggcaaattacctggctcccgctgaactccagcacctagaactatgtcacactcgtagtaggccgctgcattggttgaacaaatgattttgaaagaatgaatgtcttcctctgtgcctgcatttcctcagaaggctgtaacaaagattaaataggaaaattcgtggaaagttcaattactacaccacagaggttaattaagtcgcactgctagataaaacgggagacgagactttgaacccaggctgtgtggctcaaaccccctgacacgaagtctctactcaacctcctcactaccctgtagacaccacccaataaggctgcgcagctcccgggggatgtttctgtggaaggcaggctcaccttgtgccaccccaaacagggtcttggatctgagaggcaatgtttctgctccagcccctcaaagacactctttggatgttgtggggggaagccctctgcagcgggtggggttcagagatggattgggattggccccggggtcacacagctggggctgcatccaaactccaacccaggatgttgggctcctcctttgccctatagtcagagagaagagaccaagagaagacagaggctgggcattgtgaaggcaatgggctcacagggctcagttcagggaagggtagagtgagctgacccctccccttcccgtgcccctcctccggcctcagcctcccttcagccagtctgggtgccgaggaagggctgaccctcgctcttgcggattaggtaggatccaccctctccaccgggagccctatccgtggcctggcctcctgccctaagcctggcctgataggaggatcactttaccccagtccaaattccccaccacaccccaccaggccaggccagctccctctgaacccaagcattgtttgtaccttgagggtgcacacagattaaagggggaagaccctcaaacagcccctaatgcccaacagcttctgtggaagtggggcctgcaggccatgaagacccccagccctagctctgcccccaagatgctgtgaccctgagccctgacctttctgtctgtcctccctcagggttggtgtgaaggtctccagccatgtccgtgtccacaggtcaggcattctttctgactctccctcttccccccaccgcgccatgcccaggcacacccagattcctgtccagttcccatggctatccacccgagaccacttggtgcaggtgggcatgctggcctgccaccttcttggaagctgggccacagaaccttagccttggagtagaaatactgggttcaaatcctggctctgccccatgggctgagaggctgtatgcaagtcacttacctgctcagagcctcttcagggggcttatggtcctgacctcctgtggttgggggcccatgcccagccctggccctcctgcatgagccctactgggactggagtgtaccactgctcctcctccttctagcctcagtctgtggcctccccagccctaccccttccagggccccagcccccctccattagagtgcatccttgaagcagaggctctggggagggtcctgtgggtcaagaccgctccttcaatcaagggtagagtccggaaaggctgcctgccttcaccattactgcctgctgagataccctattaccattaccaaggatggaagaaagtgtctgggaaggaaggagccctgtaatgggggctgccctggcctccagagacacagggttgggggaggagagaggcttaagcccaggaaacaggtgcccatcctgtttttttccacaaggagctgctgcccaatgcttctctaaagtacgcttgcacaaggcctagggcccacagctcagatcccctaagctcaggccttggctccaggctttgctagccctggcacaagctggaggttccactgccccagagctgacctatgccctttcctccctccctggtatacccacagcttccagctactcatgtcaatttggcatctcccacccatttgcttatgtatacaacaacctttaggttctggacaaggtgactgaggcacctagagagactaggttctgccactagcaagaggctgctagcaagagccggatttgaactccagcctgtgagggcagaggccaagctccaccttgcatggttctgttttcccaatgaggtctagaggctcctgggcctcaggaagtcggagggttgaaatcctcctaagaagctgtgtgaccttgggcaagtcccttcccctctctgggcctcaagtggagatcataatcacaccccacagggccagggctgagagcgaggagatccgccaggttagagttgatggagaacttggcggggtgtggaggaaggccagggccaggcagggctccttgtggaggtctcagagcctggggcaaaggggcctgcaggggagctcctcctttgctgacccctcctcccccagagccagctgcatctctttctgggtttctaggtgacttggctggcccctctggatgagttctactttaaacctgctgctgttactgcctctgtattgggggggctcccacaggggcccccaggcaggaaccccccccaccagctaagccctgcgggaggggctgcagcccccacccatcccattgcccatgcgccttccccgctcccatctctggaacgcagatttcagggcacctgctgtgggccaggcactgcagagcccctcctcaaccctcctgtctggggacatccacaaagcttctgacccctctgggcagacaacagcgttccccccgcggttcccagccaagaggctcacagtcaggctccagtcatgggagtctgcagcaacaagaagggggctgttctagggctcactctcgaagaccaggatgcttgggtccttaaaggaggtggcaggcgcccggcctccctgggctagggacgggggaggggtgcctgccggcgggaggtccattagccggctaagtgctcccagggaggggggaccgcgcggcataagagtgggtgaggcgaagccagggcagaggggggcggaagaagcttttcctgcattcagctaagtgcggcagaagagggtgggcgacagggctgtgcagcgaccccccggcccaagtctagccctccgctggtactgcagccctagtcgctcggaaacctcagtgggctgatcccggaccgccttaagcagcgccctctacacccagtccctccagctgctccccaacagccacttcggcccccagcgccctccttccaccacaggcctgaagaatcaggttctgctgagccccgcagcaaagcccccgacccgtccgcgtgcccctgccccaatccccgctccggctgcagtcgccgccccggccgccagggggagccgacgcggtgggagggggcggggcccgggaggccccgccccgtccccgccccgcccgggccccgccgaggctctggtcggtccgggacagactggcgggcgggcgggcactgacgccgcggggccggagcgggccgcgcggtgggagcagcggcgccgtcggtccccgtcagggctccgtgggtccccgacccgcccctggccgggccatggcgggcgcccagcccggcgtccacgcgctgcagttggagccgcccaccgtggtggagaccctgcggcgcgggagtaagttcatcaaatgggacgaggtaagcgcgcgggcccctgctccgcccaaatcccgggactctttcagtcaagctcgaccagacgctggggacccccaccccagcctcgcctgcccgtggcgccaccctcatcccagtctggcggcgccccggaaacttaagtccccgatcgtctccgtaatgaagactttgtccccccaactcccagtccctcagctctggaaaatttgcctccactccttggcgcagagactttgaaccccaataaaccccgtccccccgttttccattcgttcttcccaccgctccctgccagactaattctcgttccccgatcctggcctggtgcccagacccctgcccagcactagactccccggctgcaggaccctgacttccaggctggctgggggcatcctcattctgggtgtgtgccagggcgcccctactctccccggtgccctgcctgaacagtcctcgtccattcatcatttttccccctgttctggttggcaccccttcgccctgcttctggatcccagcccagctccctgttcagatgggagcacccagtcaccccctagtggagactttgccccccaagttcctccacccctgggaactttgctccccactccttaggcttgggaccttgaaccccaatacatcctggcccccctttccctgtcctgcccctggtgcttcccaaatgcctgtgtccccaccttcggctgcccatccccatcctgggtgcatcctcttctgccccctgggcccttccttccctagggcctccacccggccggcctgagcttcctcgcagctccttcccagtcaggccacgggcctggaagactctgggctcttttccggctgggtggggccccggggtaggcgtgggagctggggggaggagatgggggcgtggcctgaagcggcaggtgtgcgaggtggggtgcctgggggccccaggggccgggggagacccctccccccaggctggcctgaagggaaaagtttcttcttttcattccactgtgataaacccaaataaggaagtgggaacagggagagggccctgggggtggggtggggggtgctgacggaggcttggggcaggagagcaggggacctgggctgcctttgaggtccagacccctggggagaggtgggagggaaacactaggggcagtacccatagactccccgctctgcacaccattcgggggcctcaggcccagggtagggttgggaatccggagaagtgctggggctgggtgtcagcacactgaagtggggaggcccatgcatccccaaattttgggggccttctgttcccagatgaacgcccatcttttgtaagcaaagcctgccatgggtggggctggtgcaatccccattctccagaagaggaaactgaggtctggaaagcagagagttatcccaggccccacaatggggtgtggctgaggccaggagccgggagcctggcagaagtctccgctccctgcttcccaggtcacaggacgctgcaaccacactgcctgcaagcaggtcctggctccagtgatctcgggcaggctacgaagtgtccctgtaactcagtgtcctcatctgtaaaatgggagtgacaacagcacatgcctcttaggctggttaggaggcctttgtgtgctcgaagatgctaggtgcatagaactgtacctggtgcgcagtaggggcggtgtgcgtatatgagatgtattgataataatagtattgtccaccagacactgagatgcattttgggggtggcacccaacatgaggtggggtccttttctgtctggaagaacctggaataggagggttctacctgtagccacttgttcactctggccctggccgagtctaagccctggaggacagcccctctggctgctggtcctgagtcacacagggtggccctggtagtgtgccagggaccgggcccttcttagaaaatggggctggcatgcacttccctgccccctgccagctgcacggctgtttgagggaggaagagctcactgcccagtcctgagagtagggcaagtccccttctagggggactgttcttctacgagatggggatgagctttgaggctgtgaggaccccggcagatgtggtaaggtggataatgggctttgaggcagaccacagggctatcgtgatgtcccaagggatgcagaagggcagtgggagtcagacttctcactttcatgccttaaacattctgcagtggggtggattggggggctgccactgtcacagagctctcagcacttctggggaaactgagcccaggatgggggctggggacctcttccagggggtgggtcagatttcacgggtggagaaggaagggcagggtgtcctggcaaagggaacatgagacaaagccctgggaaaggtcaggtagaatcctagggccagagggaggtgaggctgggaagaggctttgaggtaggt

SEQ ID NO: 97360 - DNA, 14458 bp, Homo sapiens
tgtactacaggcaagagccaatgagcctggtcagatttttttttcctgatttgaaatctgttatgggttcaattgatacttccaaatcaaactcagggtttcaggatttttactaacctcattgatcttacccatgtatctcctttctctaatgccaaaaatcctacttcttgaagccataataagattattcatttgttttatcccacattacacacaacaatcttagaataatgacttcccaataatatgattactgaaaacagtttaattttttttgcgcttttcaaaaaaatccttcagagatgtgtagtcaagttactgtattctgctgggcacagtggctcacgcctataatcccagtactttgggaggacaagaagggaggatcgctggacctcaggagtttgagaccagccggggcaatatagtgagaccctgtctctacaaaagaaaattaaaaattaaccagacatggtggcatgtccctatagtcccagctattgagaggctgtggcgagagtaggcttaagcccaggagtttgaagctgcagtgagatacgattgtgacactgtactctagggtgacagagcagggaccctgtttttaaaaaaaaaaaatgaaaaaacttcctgtgccttagactcatttgtaatcgtccttctctctgtgtggctatatgctaactgggtatatggttagtttatttgtttcatttaaaaaatctctttctgttaagttttatttataattacacaaatactggctttgatagtcaaattgaaaaaacaaagtgtattcaaagaagtctaccttctatccttgtcctttcctatgttttagccatagtataaaaagttatggtttatcattatatttcaaaaatataagaagatattcccatatcccactttttcttaaacagtagcataactttacatacttttttctaaccttgcttttttaaatatcctggacatcctggatatccataatagtgtctagagatagtcttcattctttttttactgtatagtaatccactgtgtacttgtaccatagtttattcaacctattgatgggcatttgggtagtttccaaatgtatcacagagaggattacagtgaatagccttgtgtatgcatcctgctttacttttgctgactactggtaatattaacattttttatgttctgtatttaaaaaatggtggttattattcatctataacttttattatacatgactttggttagcatgctttaaccttttagcataacatttgcaagctacttgttttaattaaaattttggttaaatgtaaaaaatagtgagctattttgtaatctagattcaatagaatcttatacttcctttacaaatgatagctgagttgatcatttgtgtaaatgactgtgaacttaaaaattacagcattttttaaaataaatttttttaacattttaaaattatttaaaataatagacacacaaagtaaaaagagaagaaaaaaaaaagagacagggtcttgctatgttgcccaggctggtctcaaactcccaggctcaaatgatcctcctgccttggcctcctaaagtgtaagccaccacacttggcaaaaattagtttctttaaaacaaaaacattacaggttatctggtaccatggtagcttctttaacactaggttcacttagaacaaagcttaggaacaaagtcagactttcacaaagagcttgtgtggcaatggggtattttttgcaaattccattggtggggtcaagatgtgagtttagaaggaactcttagcctgactcttctggccatggaaaaagatggttgcttctaaatgctgacctggtgattttacactgtcacatctcaaattgtggtcatcttttatacattattaacaacaaaagggaaaaattgagttgactttaagaggaagtggaaaataacgagatcacatctgtactctacaggctctccacagaggtcagactgaggtggtaaaattgttgtgcactaaattagggcattaacgtttcatggaaactgaagctatatctaaatagctgatggcctgctttctagatctcctatatacctgcttctcaaattcagtctgttttaaaaaattgccctttgaggttggaaccagcgaaataaggctgaaaacagaataagccattattgaaaaaattaggaacttggaagcagatactcataatctaaatcctctgaagctaaagtttgatccacaatagcaaagcattatcattttagtgattgtaccttagttgtttcctggcaggtgataaatttgggatcactttcttcttacagtgtgctctgatagtctttaaaacaaaccagagctctaaattgtaatgccattggtaatttaactctgatttgtctctatgcctgtctcctggtgttctgtaaaattctacacgtcatttcaggtatcactatccagaagacgttacttttgcctttgatgcactttaaaatgtgaagtctcttgtgaagctctttggttattttctcctttgctgctgaaataaattcaggttgatgattttcttgtaggatatgttgtgtgatctagacattgcaaacccaagtctttgatttttttttccctacagattgcctgtttcttttttattttaatttttattagttattattatttttgagatggagtctcactctgtcacccaggctggagtgcagaggtgtgatagctcactgcaacctccacctcccgggttcttgtgcctcagccacccaggtagctgggattacaggcacgtaccaccactctcagctaatttttttgtatttttagtagggatgggatttctccatgttggccaggctgatctcaaactcctgaccttaagtgatcttcctgccttggtctctgaaagtgttgggattacaggtgtgagccactgtgcctggccagttattaatttttttaaagagatggggtctcactatcttgcccaggctggagtgcagtggctctttacaggcactgttgtagtgcactgcagccttgaactcctgggctcaagtgatcctcctgagaggctggaattacaggcacacaccactgtgtccaacagattgcccatttgtgatctgtgtaaatatctctcacttcctgcagtatctctgctcaagaatgtaaagagatggataatatttttagatttgttgaaacaaagtaaagttctgctcaaatgagaatgacactaactaaatgaaaaggccggttataattctgtaattttgtgcctgcaatgtgtgtgttattgtacacttgaatcggccctgtgcattgtggcgaggtgcatattgcatggttgtattgaaaaggtgcttgggccgggcgtggtggctcacacctgtaatcccagcaatttgggaggctgaggcagctggattacctgaggttaggagttcaagaccagcctggccaacatggtgaaaccctgtttctagtaaaaaatacaaaaaattagctgggtgtggtggtgggtgcctgtaataccagctactagggaggctaaggcagggagaattgcttaaacctgggaggcagaggttgcagtgagctgagattgtgccactgcactccagcctgagtgtatcacaaaaaaaaaaaaaaaaggtttttgccctctctctgtgcctgctgctccctgttgagtcctataggcctgagctgccagggggtactgtgggctgagactggacattgcaaccgactgcaaggcaccgtgggacccaggttgtggatggactgtctctcgggctttcttctttccattcatcttcctcctctaactcccctctgtatccagtatccttgctctccatacacctgcttcattctttttccttcagtagatttttctgcttcttgacttacaaaccctacttctagcccctttcagatattgaaactagcaactttcaggctttgtaccaaagtctcagagattctcattgactcggatgccatccatctctagtccaaagaacaatgtcaaggacatgaacatgtggaacaaaagtgtctgctgtggacacctttggggagaaatagttttcagtgatgagggttgtagtgagttgggcagatatcccaaaaatatctgccaaaaactatagacacttctggttgcagtgacttattccttccttcattcagcaaatactgattgaacaccgactgtatgtctggatctattctaggttttgggggtggagcagtgaacaaatcagtctttatctttatagagtgtacagtcaagtgggagagacaggcagtaaacaaagaaacagttcaatattcaatctgtgagatggtgataagtgctacagagaaaacaaactagtgtaagataaaaagggtgttttgataggcctttactatttaggtctctttgataaggtggcatttgaacaaagctctgaaggaaataatggagccaaccatgcatataacctcagggagaacattctaggtagagggaacagcaagtgcaaaggccctgaagtgggggtttgtttaccttgttgcacaatctgcacacaggccagtacaattggaatggatgggaaatgtaaaagagagaagttgaaaaggccaggtgcagtggctcatgcctacaatcccagcattttgggaggctgaagtgggaggaatttgagatcagcctgggcaacagaaccagacctcgggctaatttttgtatttttagtagagacagggtttcaccatattggccaggctgatctcaaactcctgacctcaggtgatcctcctgcctcagcctcccaaagtgctaggattacaggtgtgagccatggcccccagccgtatctttgtcttaaaaagtaatctctgtgcttggtaggccaagaatttaaaatataaaaaatttaagaaagaaaaaaaataagtaaagtaactatacaggttggtctggccgtaatggtgagtgtcattatttttcttccctaggtattttggctctgttgctcagagcagtgcaggcgaaatggtcattagggcatcgtcatggtgcctggggatgcctggctcagccagtttattttctgtctgcctctctccttggtccttttcctccactttcattcatgaaattctagtcaagagctgggtccagtggttttcaatccaagggctttggaagcctctggggtctattttggtcattgcagtcactgggctgctgctcctggcatttaggttggcaggggtctgggctgggaagcaggaatgttcagtggccataaatgtaagggttggtcttacatttacataagggagacaatgaaaacttaactcctccacagtagtggagtagtgccgttgggtactcacagtcagtagtgccgttgggtactcacatgtacaacatggatcaggacattgactttctgtggataccttttaatagtttattagatgtgttaggctgttttgcactgctctaaaggaatatctgagtctaggtaatttataaagacaagaggtttaattggctcatggttctgaaggctgtacaagcatggctccagcatctgcttctggtgagggcctcaggaagcttccggtcatagtggaaggcaaaaggagggcagacgatcacatggccggagtggtggcaagggtggggtgggagccacgctctttttttaattttattttaatttgagacagtgtctcactcttttgcccagcctggagtgcagtggcgtgatctcagctcactgcagcctctgcctcccaggttcaagcaattctcctgcctcagcctcctgagtagttgggactacaggcgcgcatcacaatgcccagctgatttttgtatttttagcagagacagggtttcaccatgttggccaggctggtctcggactcctgatctcaagtaatccgcctgcctcggcctcccaaagtgctgggattacaggcatgagccactgcgcacggccaccacactgttttaaacaaccagattgcacgtgaacttagagtgagaactcactgtgaggatggcaccaaaacattcatgaaggatccaccaccttcctttaggccccacctccaacactggaggtcatatttcaacttgagatttggaggggacagacatccaaaccgtatcattaaatttaatagttttatgcagtttttttggctctagatctgtttagactcctgcagtcaggtgtctgtaactagcctctggtcctttttgagagttcacagtttggtgcaaaccctttggatgtattatttgggaaaatgggatatctggcagcctgtgtccctgctttacattatcctttttgctgcctgccccaagcctcctcattagcatccctgccaaggccagtggagaaggatggagatgcggtgacattcagcttgacaggtcattagcagcttttgtgccctagggactgctggtgggagggagrttgtggaagataaaccctgacaggaatgtattctcctcgagggcagggtttatttgatatttttctggagcttagaaccataagcctggtgctggggaggaagcgcccttagcatttggtagcctctgtgggcagagcatggaaagtcacaacttctgaattgtttgtattttcagtctcactctagatggatggcatcttctgctatgggaaatgaaatatgtttaggcaacttgagtcccaggtgcagatgaggctgggctaattggtgcactagggaaggagccgggggagagatgtgctgttagctattatcaatctgtgacarctgtcagctgctggcagttagcacccacctgagcctgggatgcaggggtgcctctcctgtcctctgtggaagcctctggacccagcagccatcttgactgtgcactgttcaagccccaagtccgcctggaagaggtgattgagaacttactgcaggataaggaaagcgcaggacaggtgcagtggctcacgcctgtaatctcagtgctttgggaggctgaggccggaggagggctggagtccttgagtgcgagaccagcctgggcaacatagtgagaccctgtctttacaaaaaggaaaagaattagccagatgtggtggtgcgtgcctgtagtcccagccactcaagaggctgaggtgcgaggatcacttgagcccaggagtttgaggttacagtgagctatgatcataccactgcattccagcctgggtgagagagcatgactctgtcccaacaacaaaaaaaaagattaagggaagcctctggcagacctgatgatgggtggcccagccaaaatgagtattgatgaggatttccctggtctggaactctgaatttagtctggcaaagtattccctttgtgttgtgagatgattcttggtgttaccccatcacggtaggtaagatgaattagcaaatgagaaaggctttctctttttcatccttatctagtccgtagatgaagcctgaagaaggtctccatatggtagtagtaagtgtttaacatctacctctaacacttgcctgtgtctttttttttttgcaaagcctcaggaatgccccagtatctaggtagaatttgataatatttcatttttgttatattcccttttctgtttaccttctatatacagcaaaatgaaaaaatttttaaaatttgtgcaagtaagggcaatttcttttttctttttctttttttttgagacagggtcttgctctggcacccaggctggagtgcagtgacacaatctcggctcactgcaacctctgcttcctgggtttaagcgattctcctgcctcaggcttccaagtagctgggattacaggtgcctgccaccactcccagctaattttcatatttttagtagagaccaggttttgccatgttgactgggctggtcttgaactcctgacctcaggtgatccatccaccttggcctcccaaagtgctgggattataggcttgagccactgggcctggctgaggcagtttctttttgaaatatattttgtgaaggagaaaaagaggagttcagtttaaagaaacaaatgacataagaggtggtatgcagagatgccaaagcatcttgaaggtgcttttttttttggaaacagagtcttgcttcattgcccagtctggtctgcagtggtgcaatcatggttccctgcagccttgaccttctgggctcaagtaatcctcccacctcagcctctcaagtagctgggactacagatgcatgccactatgtctggctaatctttaaattttttgtagaagccagctctcaccatattgcccaggctggtcttgacctcctgtcctcgagcaaaaataccgattttgattaagtctggggtaggacctggggctgggattctaaccagctcccaggtggtgctaatgctgctggtctacagaccacacgtggagtagccagtgtagagttcatgtagcaatagtgatgtcatagaaatagccagtatctgtatacttgctttgttgtatgtcacgcactgtatagtgatgtacatgcatctcatttgaccctcaccccgcccctttgggggtagaaaggattgtgctcatttcacactcaaggaaactgaggcacagacaggcaaagtagcttggcgaaacagaaaggaacttagaggcaggccctgattagctcagagactagaaggccttgtgcgtcatcctgaacagcttggacttgatcttgaaggtggagggagaaattgaagggtaattaaacaggaactgtaggaaattcaccttgcatagtgattgctttggccacgtgtgccctgccaccgcccccccacctcagtgaagtgtcatgcgaagttgggttcgtaaatgaaggcccgaatgctttcctgacaagtttgttttaaatcaagctgctaattagtcccagtccccctcccccggtatgtatttttttgttgatgtcgtttcacttcatttagttgaagtgattgattcagttcagtgtttgaacttctttttgaacctcaccttaataacctgtctaaacatcaaggttaaaccttcttgctaacacagcagtattgcttggtaagactggctcacagtccaaggaaatgcttgcccagagagggcaaactgccttaactccttaacctgagctcattaaaaaaaattcaaatgactgattccttgtcacagttctacctacattgtttttatttttgtccaggtttcagctagttaaatgcttttgtgatgagcttatgtccaggctgaaggttgcattttgaaactgagcgtcaaataccaatttaaagtccagacctttacacttgtgaaattcagataaatgaaatggaaataaaacagggctgctgtgttgtgaaatatgactgtgtttttccttgtaggactctttgagggtagccattttggcattttatatataaattttcttttcttagcctaccttttactttcttgatttgcctatttgtgatttcccattaaacactaggctttttgtaaaccaattatcccttgaaattgactttttttttttttgagacaggatcttgttttgccacacaggctggagtgccgtggctccatcatatgataaacagaaagagagagagagagagagagagagagagagagagagaccctgtcttatttaaaacaaaaaaagaagaagaaaaaaagaatatagatcacagctgttatttgtatatgctacgccaatccttgttgggtttcattctttataattgttatttttaaagatttttcttatgaatattctattgtttcattgtagaaaatttaagggagaacacagtgggaaaaaaaaaacaagaaaaggacttcataatcctgctaccctgggagaaaaaaaaaatcaccattacctatttggttcttctcccacttttttttttttcgagatggagtctccctttgttacccaggctggagggcagggacgtgatcttggctctctgcaacctctgcctcctgggttcaagcgattctcgtgcctcagcctcccgagtatctgggattacaggggtgtgccatcacacctggctaatttttgtatttttagtagagacggggttttgtcatgttggccaggctggtttgttggccatgtctggttttttgtcatattggccagtctgtttgtcatgtcaggctgacatgttttgtcatgttggccaggctggtctttaactcctgacttcaggtaatcctgaagtgctaggattataggcgtgagccattgcacctggccttctgccttttttttaaagaaaaaaaattaaaacatttttttctttttaagatagcgtctcattttgttgcccaggctggtcttgaactcctgggctcaagtgatcctccagcctcagcctctggagtagctgggactacagatgcacatcatggtgtccttatgccatttcttttgtacgtaggtgaatgcaagtgtatgattacatcatatgctattttggaggtttgactttcttttcactttcatcatctttccaaggtgttattttcctagtacatctttttaaatggacatagaacattcttttgtatgaacaaacaatagttttatttaggcggtcctttcctgttggacatttatattattttcagcatttctccacagttgttgcagcattcagatgaaccttctttttttttttttttgagacggagtctcgctctttcgcccaggctggagtgcagtggcacaatctctcctcaagtgattcctgtgtcaccctcccacgtagctgggattacaggtgcccatgtctggctaatttttgtgtttttggtagagctgtggttttaccatgttggccaggctggtttcgaactcctgccctgaagtgatctgcccacctcagcctcccaaagtgtggggattacaggtgtaagccatcacgcctgacccagatgaacattcttgtagctatcgcacacaattctgaacatttcctaggatgaattccttaaagaagtaatgctgatccaggcttttttctttttctgtgactctttgacacgtaataatattgacttttctttctttccagacactacaacaacaggagtgcaaacttctctacagccgaaaagagggtcaaaggcaagaaaacaaaaacaaaaatagatataaaaacatcctgccctgtaagtatcaatattccgctcagtaatagtcactcttggagattttgattcctagcacctctgtacctttcctcagggtcgtgtgctcttgttagcacatcggaggccttagcttctttaattgcaagcagtttccaaaataatcaaccatggtgggtgttgatgacttcattcactgagctcccgtgatgctgattactgagtaaagttgccactaggtggctttgtctgtggttggttccttctgttaattaattttctgtctgcccaagatagatcatctcaaggcttgggatctctcagtgtcagggaccttagggtgccagatttgtgtcttgactcctcctcactgggcctgtgagtcctgggtaaggcctgcctcctttctgggactcagttcccttaagtgggaaacagacaaacacctcctgagggctcctagaactgttctgcttgctgatcccctgagctcaagttactggagaaagggtatatacctaaactgctcagaagaagactttgtgggccgggcgcagtggctcacacctgtaatcccagcactttcggaggccgaggcaagcggatcacctctgatcaggagttcaagaccagcctggccaacatggtgaaaccccatctctactaaaaatacaaaaattagccatatgtggtggtgtgcgcctgtaatcccagctactcgggaggctgaggcgggaaattggttgaacccaggagatggaggttgcagtgagccgagatgtgccattgcactccagcctgggtgacaagagcaaaactccgtctcaaaaaaaaaaaaggaagactttgtgaatattcgcaaagctgtaaagctgtacctttcaatttttttttgagacatagtctcactctgttgctcagggtgcagtcacagctcactgtagcctcaacctcctgggctcaagcgattctcccacctcagcctcctgattagctgggacaataggcaggcaccagtacacctggttgattttacagtttttctgtaggccggcgcagtggcttacgcctgtaatcccagcaccctgggaggccgaggtgggcggatcacctgaggttaggagttcgagagtagcctggccaacatggtgaaaccccatctctattaaaaattacaaaaattagctgggcgtggtggtggatgcctgtaatcccagctacttgggaggctgaggctgaggcaggagaatcgcttgaacctgggaggcggaggttgcaatgagccggaggtgctatgtgcaccactgcactccaggctgggcgacagagtgagactctgtctcaaaacaaaaaacgatttaaaaaataataaaattttttctagggcggggtctccctatgttgcccaggctggtcttgaactcctgggctcaagtagtcctcctgcctcagcctcccaaactgttgggattaccagtgcaagccattgtgcctggctgtaccttctgtaacacccaaatgccacctggcaaagcccaagttgaatcatgaggaaaaaaggcctggaaggatgtagaccttccttttttctacttatttatttatttatttttgagatagggtcttactctgttgcccaggctggagtgcagtggcatgatcatgggtcactgcagcctcaacctcccgggctcaagtggtccttcccaccccagcctgcaatgtagctgggactacaggcatgtgctaccatgcccagctaatttttgtattttttgtaattattttttttgtagagacagggtttcgtcatgttgcctaggctggtctcgaattcctgggctcaaacgatctgcctgcatcggcctcccaaagtgttgggattacaggtgtgaaccactgtgtctggctatatcttctgtaacacccaaatgccaccaggcaaagcccaagttgaaccaggagggaaaaaggcctggcaggatgtaggccttgcatgaggatctcagaaactgcactaaaccagtcacagttcctctctcccgaggtctaactctatgctgaactctttgcatttttatctcacttaatccatatcacatgcacaggaaggaagcattcgtagtatcctggtttcctagaccattttagcaaggttataagtgaaggggagtgggtgggagaactggcactagagcccccaaagtcactgttcttagcaccactctaatgcatggggttctccattgatgtgctatgcaaggcagtgcactgaggagaaaggaaggaacatttacaacttctctttatttatatcctgtccctaaaaaaaaaagaaaaagaaaaatttgtctgaggcctagattgattgcagggagtgcataatgttttattgattgattgattgattgtatatagagatggggggtctcactatattgcccaggctgatctcgaactcctaggctcaagcaatcctcctgctttggcttcccaaagtgctgggattacaggcatgagcgactgcacctggctatgcatactatatttatccaacttacaaataaggcttgcttgcctgtagtgcatatgtgtatacatttcagcatagaaaaactgtgtgattgggggttgtgatcaaatttggagagcattgctctcatgtcttatcaggtcagagtcattttgtcaaatcttgtaaaccattctttgtgtgtgtctatgcatgaaacatagtctttctctttctgcatgcatatgtacatatacatggtatatatgtatatcatatctacatggatattgtaatgtatatgtatgaggatgggggaaagtggagacatttgtaatactgagaaaaggcagtgaggaatttgcagagaagcagtttgagctgtagcatggtactagtgaccttgaggaagccttatcctttttttttggaatttattttttcaatttttagaaatagacaagagtttctctatgttgcccaggctggtcttgacctcctgggcccaaactatcctcctgccttggcttcccaaagtgccaggattacaggtgtggaccaccatgcctggccaccttgtcctttctatgtctaagttgtgacatctgctcaggggtcaggtggtattaaatggtataaaatgtatgggaaagtgaagggatcaatggtatgc

SEQ ID NO: 97361 - DNA, 14169 bp, Homo sapiens
gtgcacgggggcagaggcctccatccaggcgggcatctacgtgagtgggctgagggcagctttggggaatcagcataggggagtgaaggaggcagaagtagggagtcaaacttctttaccagcttgctgcgtgagccccaagccaaacttattcatcttttgccatctatgttttctttttcttttttttttttttttttttttttttttttgagacagagtctcactcagtcgcccaggctggagtgccgtggctcgatctcagctaactgcaagctccgcctcctgggttcacgccattttcctgcctcagcgtcccgagtagctgggactacgggcgcctgccaccatgcccagctaagttttttgtattttttttagaagagatggggtttcaccgtgttagccaggatggtcgccatctcctgacctcatgatccgccctcctcggcctctcaaagtgctgggattacaggcgctatctctgttttcttatctctagtgcggagactgtacttgaacttgccttacatccttattgggccatctgaggttcacacaagataacagctatacacgggccttgaaaaatgttaaggacacacactttggggatggggttggcttcatgatcatatttgttaaaagtgcagtagttttggtaaaaagaccaagaagaaaaacagggaaccatgccttaattgtatgtgggaaatccccgtcttattttattgaggaaaactgcagtctttagtcacttatataaaataacagtcatttagttagtcatgaaggtgaggtgattttccagggtcacagctgactactgcttgttttgtctcccagacctaggaacagataagctgccagtgcccgactcgcccctcagcgacccaccagccacttatgggaagttggcaggaagttggaggtggtgggagggagtgtcattgacagatcaaagtatgaggaaacgaagggaaaataacaacttccaggttccaagccctactgtacgccaggttctctgctgtactttataaacatgaggcctaatctgcacaatagccctgaaaaccagttaccattttatgctgagggatttgtggtttgtttgaggcaagccaagtcaggcccaggcccagccctgccaggccccagtgcctgagttgccccgctgcttaggagaggaagggaaggagggcacgaacaaccatgctagggtggggggacagggccagggctggagagggtagcaggcagccgccaccacaggggactcctgtccctgcctcccagacagcctccccaggtagcgtgggcttcctccttccttctgaggctcacagcaggagggcactttgcatcacatgagacattctagggaaggctgacccaccaagctgagtagcagagctgcctagacctcctcctactaagttgcccagcggccttgggagctgaggaagcagtgggggagagggaggagcgggtgccaccttggcagtgtcgtgagtttcagctggagtccgccagccctctgcttcactgtcataggcagtggtcgccatgtgggaaggggcaaaaagaagccgaagctcagagaggaacaatggatctgtgtgtgattgatctacccatggtatgtcttgggcacctaccatgtgccaggctttgtgctgggcactttgagggctaagacatgagtaggttgcatctgctgtcttcaagttgtcagcaggtaagtgacctccaccccgcagagaggcagtataagctgggggacttaaaggacatggctctccttcctcttgtgccctgcccttagagcatttggaacagttggcatttccactgttgacggtgggggcctggttgccaggctacctgaggcaggcatggagttgaatgtgacccatgggcctcaccaggcctgaagcagtgtctctcctgacgtcacgcatgacgggtgctgtagaatgctataggccaccccgccaatgagcaggctaggtggctggaccaaatatggacaaatctgagcatcgccatcctgccaggttatgactggatagtgtttgtgatgagacgtggcagatgccttggggtagaattgatgtcatatccttggtgcagatgccatacctacaggatagtgtccaggtggttccagcattccttgacctggggtcagcaaactgctggcatcttggcagcttggaatggccagttggtgttcctcctcaccaccaggtagagaggaagtgctgatgaggaagtagtttccctagaaaatgggctgagagggcacgtccagggtgccacagctctgaagcagcagcgctgggagtcactcccacaccactcaaaccctgagttcacctcttgctcacggcaccacaggcctgtctccatggtgtatccatctcagaagtggaggctatgatcgtggtgtatccttcgtctcagaactggaggctgtgacatgtgcctttctctagttccactgtttagcacccagaatggtcccaataaatgcttgctgctgactataatgaacaatcagcatgattgaattatccattcttctgtctctcaccgcactgagcacagtgatccccagaaagctctggaacaagcacagcactcacagggagttctggggaaattttcaggagaaatttcactgctgcctgtgacccactccaagtggggaactgataaggcagataaacattcaaggaagacaaaacccattatggctcatactgttgaggtaaacatctctggaacaaaaagatttctaactgccagcctgcacgcatgtatgaagccttttttaagccacagaatacaagtggcccatctgtctcatgtttatagttttctcaccaccggtgagcttagagggccagtggttccttccagctctgatgaaagtgctgcctgtggaggggcgctctgggggaggaacaggtgcttagactgtggaggtggctgaagccaatattgggtcccgaatctgtaaagctttggaagatgttcccactgtgcctggttctccatgggttaagtgtatgttttcacaatacactttaaagaaaaccgtgtttactctcccgctcagttaagtttggttggcaggttgagcagttcagcagtgtacacaaatcacattctcaggaatttttggatgctcagctgatgcaaccagaagatacttgtgtgatgacaatatgttattgtaagtgggaagtcagtatttcttatcttctgagctttcttgtttttacctcctttacaggccactcgctctggtgggaccctcgtgcttgtggggctgggctctgagatgaccaccgtacccctactgcatgcagccatccgggaggtggatatcaagggcgtgtttcgatactgcaacacgtgagtatgctgtgggtgagccgggatgcccagcctccagcaagaccatggcaggccccactcagcctctggcccatgagtctctgcctgtttgttcatggggggcactccctggccacactgatagctgtgtgatataacagggatccaaagagagaacactcactgccagttaaagaatgggaggaacagaaggatggatggagggagggaaggaggggattttgaagcatagtcttactgagtgtctgctgcttatcccccccaggccccttttttccccctattttcttaagttgccaggtctccattttctccctttaaagggaagaaggagagaaaggaggacaaaaggaagaaatcaagtcctgtggcttccgttccttagccctagggcccaccctggggagcgaaagggtcttagtttgccccacccatgttctgcagctccaccctctcccctgctggggccctctggctgggacccctctccccagcagtgtcccttactcctggctttagaggctgtaactccatgccctcatcagggcgccagttttccagtaagctgagctgttagtgggtgtgactggattgtcccgggctgcctccccacggcttctctgccttttcccagtggcctccaccatgtgcctcgtaccttcatgccacaggaattctaggctccatggcagacgtggcagagtgagcgggtgggtgaggggtgggggcaattgcaaataggctctgtacccctgaatcataagccataaggtcctttcctgggttgttggcctgtaaaattggctttgcagaaccacagtgctatcaataaatacggccaagctgatctagtgcttggtagtttggggcacctggctctttcctcttgaaggttgaatataatgctcgtgctcttttacaggtggccagtggcgatttcgatgcttgcgtccaagtctgtgaatgtaaaacccctcgtcacccataggtttcctctggagaaagctctggaggcctttgaaacatttaaaaagggattggggttgaaaatcatgctcaagtgtgaccccagtgaccagaatccctgatgttaatgggctctgccctcatccccacagtctcgggatctcagggcacaatggctggacatgggtgggctctgatgcagaactttctcttttgaatgttaagaataactaatacaattcattgtgaacagaagtccttaagcagaggaattggtgtgccttaaagatacaatctgggatagtttgggggaacttgtagccagaatgccctgttcatgctgagcaaagttcagcaagtagagcagagtttggcaggcaggtgccaggaactccccttcttcctggagtgccttcattgaggaaggaaatctggcccttgggtttcctggttccactgctactgacccagaggggaatgagggctgagttatgaaaagataacttcatgaagacttaactggcccagaagctgattttcatgaaaatctgccactcagggtctgggatgaaggcttgtcagcacttccagtttagaacgcaatgtttctagagacatattggctgtttgttttgatgataaaaggagaataagaaaaggcatcactttcctggatccaggataatttttaaaccaatcaaatgaaaaaaacaaacaaacaaaaaaggaaatgtcatgtgaggttaaaccagtttgcattcccctaatgtggaaaaagtaagaggactactcagcactgtttgaagattgcctcttctacagcttctgagaattgtgttatttcacttgccaagtgaaggaccccctccccaacatgccccagcccacccctaagcatggtcccttgtcaccaggcaaccaggaaactgctacttgtggacctcaccagagaccaggagggtttggttagctcacaggacttcccccaccccagaagattagcatcccatactagactcatactcaactcaactaggctcatactcaattgatggttattagacaattccatttctttctggttattataaacagaaaatctttcctcttctcattaccagtaaaggctcttggtatctttctgttggaatgatttctatgaacttgtcttattttaatggtgggttttttttctggtaagatttggacctaaatcgcatcatgccaacttgtgactttgagactattcatcaagaatgaggatatagtagccatgacatagcttgagctatagcctttaattccttactttggctatgggtggagggtgagtttgaagaggttctgattttcttgtaacctgggaaagccatgaccttgtgcccgattctttcagattgctttgggtaataaatattggtggtggtatctgactcatgctgctgtttatggtcctgtttagtggggaatggactcaggttacccatttcccagagggaaggatcccaggatttttgaaggttacatattttctgtaccaaatataatttcattgacatgaattatctctaatcctcatgacaagccacatacacaatcattttgtagataaagaagatataaatgccagaggagaccttaagattgtcttacaacacaacccttcagttaacragrgaggaaattgaggctcagattggggaagtgacttggcaaatcacacagtgggttagtcaatggcccaggattagacagaacccaggaatcctgacatcaaatcctttacaacatgctgcctctcataggcctgaggtgtccagtcctagaggacaaatgatgctccccatgccaccacccccaccaagcagctcctactgatgagaagatgcactaagcagtcttggtggaaacatcwtcctcacgccctgtgccccctttcaggtgcccagagaaggagctcagtgtctgcttcagccagggctttaagagagaaggaagctgggagtgaggggcagaggctctaccagagaatgtctgctggtgtcttggagscacttcctgcagcctatgcatgcctcgtgaagccatttcactgctgccccttcatcctcctcctccctgagccctaggtagaagtcagtgtgtggaggaggccacccagagatgaccctgaccaggccccaccgcctgtagccagacccagcctctgtcccagctggctsctaatttctgagcattkcttccctgttakttggcctcwgtaccttgaacctaggttgacatcatgagcagaggacagttcttaggaaaggcaaatatcccataaatcctatttgcctcycyttctcctaacctctggctccaccaactccccaacaggcctcctgcacacacaataggagycaggagggaggaggcaggactgtgctacacaagggagactgggtggggaagatgtcagagaaccagtgactgagtgcagaggtgacttcacaccagcatctgctgtagccagaggtgggctgcaagagggaattagaggagccaacatgtcctctttctcctttagggtccatggagcagtccgctgcttccaggttgcctgtggggtccttcccagctctccgccctgacacgtcttcactccctagcactcgtggagctgactgggtggggacctcagtgttgactgaaagcgtgaatcaagtgccaggcactggtgacagagcacacagaggctgctggkcctcccaaggtcggggagcttgtggggaattcacattcttggttccgggactgattcactgagtsaatcaatattgattgagcacttagttggttgtggtggtggtaggaatgaattcctgggcttcctgcagcccctttccatgaatctatacatatcaaacrtgtgcatgcatttgtaaacattaatgggagtgtactttacttttttcattttactcataaacagaygaggactttwaaaaaatcacaattattaaataattcccattactatacctgacaaaactaataataatttcataatagctaataccccgtcaatccatgccatattttccctcatctaaaaaacagaaaaaattacttttttttcccccaaagacagggtcttgatcagagctcactgcaatatcaaactcctgggttcaagtgatcctcctgtctcagcctctggagtagctgggattataggcatgcaccaccatgcctggctactttttgtagagaaaaaaatttaaaaaggyctcactatgtggcccagagtgttcttgaattcctggcctcaagcaatcttcctgcctcagtttcccaaagcactgagattacaggcatgagccaccatgcccagccaaaactttacttttttayacttgcttttctggaatcaggatctaaacatattgcatgyggttgatatwttaagcctgttttattttttattttttcttctttcttaagcctctttattatagttccccctacattttggttcacatgccactgttatgttgaagaaactgggtcctttgtcttctggataccrttttacaaacatacttgttttcatttaataaatgrctaaatttctttctatgtcaataattatacacatcattattttaaatcaccacatcccattgtgtggatagactatcatttataaagcaaattgcagtattttgagtgtttggatagtttacagagttttgctctaataataaagttgcaatgacaacccttgttgcatatttttgttctcctgactcattatttcctgaagttattaatatgttatttcctgaagttattaatatgttatttcttgaagttatattttagaatgaaaatagctggggttaagggtacacacatttttaaggtgacctggttagacaagaaaacacagtattgacattcagactgtctaagaaaatctctgggggtgccccaggctttgtgtgatgtgggaagactctggggtcttgggtagctcacaggggctgttgaggatgaggccatgaagccactggctctctggcttcaggccacccttgggaaagcaggggcctagacccataaacttggacagattgccattttccaggccccagtttccttatcagtaaaattggttgtcccttttagctctgggactactgccaggacatgacaacaaacagctcctgtaaaggactggcacagaattcacagggaactgtggcccagctactgtggagcagtgagccgccatcaatgaacttatactggaagccttccctacccctgtccctccacctcaattccaggggacactgggtaccgttcaccaaactttttttttctcctccaggtttatcttacaaccaaatccaagcagaggctgccccaccccaacaccccattttacacaaggggggaatgccaacagaattcagcagcctgactcgctcacccctcaccacttccattgctcagggcattgtggggagggaaaaatcccacctcagcccaatacacttccagagttccctactacaggcattctgcaatagttacaccagacctgagctcactgacatggttgggatggaagaggctgggcaaatggcagcttcagctaaccttgaggctgccatgttcactcttccccactggtcctcaggaaggtgagaatccctgatcccctgtggcacacagcagagggcccaggaggaagaagccagagggaggcaaaacagagagcccaggaagcttgcccacctacagagagcaaaatgccctatccattcccactgccacagcaacagatgggtgactcggaagttggggagcctccgtgatggcttcagggatcttcccagaaagtacagaacacatgttgctgtctttctcctggctaggcccacccaagttagtgaatatccaggagccccttccccttgtgcctgacctggcgatttcaggaaactaaagtctgggactcctgatctatcttttggcccagtaacaatgttattcaggacaaaaatatttctgcttgtaataacctagaattagtgtttcttatgatatacaaagatggggcatattgctgttgaacactatcagcaatgaaacagcaaaagaaacaatgggggagagggaggagcataagaccattgagatctgtttcactgagaagttcagggcaggagcccctgcaactctaaagaaaggccattcaccaaagttttttttttttttttttttggagacaggatctcattctgtcgcccaggctggagtgcagtggcgtgatctcagctcactgcaacctccacatcccagatccaagagattctcctgtctcagcctcctgagtagctgggattacaggcacacaccaccacgcctggctaattttttgtattttagtagagaccgtgtttcactatgttgccctggctggtctcttgagctcagacaatctactcgcctcggcctcccaaagtgctagaattacaggcaagagccaccacatccggcccattcaccaaactttaacaaatcaccaggaagaagtaagggtggtatgtgtagaatgttccttattggttctgacctctccaagtaggtgcaaatccatgtggcataaaatgacttggattgggtactggcttagtccattttgtgttactataacagaatacttgggactgagtgatttacaaataaaggggtttatttagctcacagttttgcaggccgggaagtttaagggcatggcactgccttctggtaagggcttttgtgctacaccataacattgcagagaaagtcaaaggggaagcagacatgtgtgaagaggccaaactcaagggacgtcctggcttggtaacaacccactcttgtggatctaatccgttcctgagagaatccagtcttgctagagtgagaactcactaccgcgaaaatggcaccaagccattcgggaggaatctgtccttatgacccaaacacctcccattagccatctgctcccaacactgccacattggggatcaaatttcaacatgagttttggtggggacaaactcaaaccatagcaggtgttaatatgcagatcttagatgctcagaccccaagagacttggcaatttgtagaacccttaaggaactttgccttctgagtgatttgaaagcatttgtcacattgctgtttcattctgtgggcacatatgtgtatgtaacgctgtgcttatatagcttaacaatactgtgtagattttcgagtgctcttgcatatttgtgctatctgttttcaggaataccaaagggaatcatatctcttgccactcatcatgtgagatgggatagggctgccagcgctgacagtattaaggtctaatgattctcaggaacttctggaaaaactgttatcagtaagcagaaggagtccaacacatgatctgtgagaaggtgaatgcggaaaaagctgggaggcaaggaactagtcatccagggcagactgaagaaagtgactcagctctggcctttggggactggggctgctggttctggggagcagctgggctttcagcacagcacagggacagacaggctctagccagagctctcctgggccaaccccaacttgccttcccctgcaccacacactaaatccccacaccctgctgaacacccaacaaaactaggacctgaggaaggcccttgctcctgccatgctgccttcttccggaatggggttccagagggaatgatgcttctgaagggaagacagacattgccaaggtggttggctggggaagtttctgtcatccagtctgtatctggccatgggcctgtggctgactggagggacagctctcctgcatttggaagaggcactggaagaggcatttggaagaggcactgggttgtgtagatgtcttgggctccctatagtaagaaagaggtgggtacacgttaggctactctgcttcctgatgacctcgagcaactcacttgactccttcaagcttcaggttcctcatcctttaagtcggaaaaataaaacaagcctcaggcttgtcatagggacagaataaagaagcctgatgctcttcccctggtgaatggcactctgattatgtttattaagtgcttgtacccctgcccttgtctcaccaaattttctctcttgacctgttaaatgagtaggatgaatgaccctcaagacttttccagctctgagccctgagtctgcaaaggtgcttgaaggtacgtgaagagttcccagggtggcagaaaaggcctcagcctggccttgacccagcattctcagcaattccacaaacctgccagggaaagagagttggcagcagacctggaggccaggcagggaggaggagaggaaccaggtgtcagcacttaggagctgcctcttaccagcctgctctgctctgctcccctgatgcccccccaaagagccgctggacccaggagctctgggtggttggttcacatgaacggggacccctagaagccatgaccaagtctcacatctacattatggaggtttccctaactggctggcacagtgcctggcatgtagaaggagctctggaaatgtctgtagcctcacaagcaaccagacctcactcccagctcccagctatttccatcgtgccccttagcctgagctaaacccagagcagccgggaatcctcaggccggcagtctcaacatgtagtgactctttgtggaaggggaagccaaacctcaaggaccaggagaggcacgtccagagactgcagcaagaggagggctcacctggcctagagccccctgccccagaaacccaccagagataccctagggtgcaaataagacaactgagctggacgtcactgagggaaaaagagtaggaccagctgctccatccagacagttttggcttttaagggggaattgtgggggaccctgtggtgtggtgaaaacaataccggaccagaggcagggttctgagttctgggccagggtccccaacccattaattttaggagagctaatagtgagtacgttcttttttttttttttttcttttttttttgagacagaatagagtcttgctctgttgtccaggctggagtgcagtggtgtgatctcagctcactgcaacctcctcctcccaggttcaagcaatcctcctgcctcagcctcccaagtagctgggattgcaggcgtgagctaccacacccggccttgtttatgtacttgagtatccaggtaggagtcggtgaaacccctcagaattgttatcaactacaatagaatgctaagcttctgtgaacaagaataaggaatgaatcacaacagctgaacctgggtgcccactatagaccagacactattctgagaataccaaatatcttaactcacataaccctcacaataaccctttgagagtaatatcattgcccccattttaaggctgagaaaactgatgtacagagggattaaatgatttgccccagatctcgcctacttcctacatacatatgtttgaatatgtgtagaaaataatgtccaggctgatggacatcaaactattaatagtagttagctctggaagaaaggactttgcggttttgtgttgtttgcccagcgggatggttggggacaggaggactttcattttttactgtataaattcctctataatttgaaaaattttaaaaaagcatgttcatgtgtcatttttgtaagttaagaaaaactaataagaatgtcacaccttgctgtggctttcaggctcagctgcaacattttcattccagaaagcccttgactgcagcaatttcctaggagcagtggaaggcagggaagcacccactcaccactacaagcctagcagacccctgggcagcctgggcagggcgatctgtgataccatagcccgtgtaggtttgttatgaggcctcaaggaccgtgggaggacagttaaacagatcccgaaagcgctggttccgaaaagccagctgcttcctttcactggcactcggtcttttaactaaccacctactttatctgatggtcagcggagtaacagtagggcagtccttgacacctccttttaggttgtgtgcctgtatttttggttttagccgtgttttgtggacgctgagtcactgagctttgttttcgaatcaagattacgagccttccacttttctgaggagttcttctggtttatggctgtgactatgatgcctgcacgtccatcctgccttggatgtacctttattacttccttcatttgctttctttccttctgtatcaccccctgtgatttctgtagaggactttgtttcctgggtccttttaaattaggtcagaaggaaatattattttatctttctagtttttaaactggatttaccttaagaagctttaacagactatttttttggccgggtgcggtagctcacacctgtaatcctggcactttggaaggccaaggtgggaggatcacttgaggtcaggagctcaagaccagcctggccaacacggtgaaaccctgtttctactaaaaatacaaaaagtagccgggtgtggtggtgtgcccctgtaatctcagttatttgggaagctgaggcaggagaatcccttgaacccaggaggcagaggttgcagtgagccgctatcaagatcacgccactgcactccagcctgggcaacagagctagaatccatctcaaaaaaaaa

SEQ ID NO: 97362 - DNA, 16086 bp, Homo sapiens
cctcagcctactgggagtgggggttttgcttgatggttttgctggaggctgcttgtgggtgtgccctgggagatcccttttccttggccactgggctctcctgggtccaacccatgcttctgagagtctgttctgggtacattgggaatgtctatgcctgctagctcagacatcatctaaaacagcaagcccagcagtggctactcatgctgacctcactgctccatgacccagcagcgccactcttgatgtgtacctgagtgaaataagggctgttgttcaccaaaagacacaaatagaatattcatagtatctttgctcttttttttttttttttttttttttttgagatggagtcttgctcttgtcacccaggctggagtgcagtggcacgatctcggctcactgcaacctttgcctcctggattcaagcgattctcctgccttagcctcccgagtagctggggttacaggcacctgccaccacgtctgtctaatttttgtattttcattagagacggggtttcgccatgttggccaggctggtctcgaactcctggcctcatgaactcctgcccgccttggcctcccaaagtgctgggattacaggcatgagccaccgcccctggccagtatctttactcttaattgtcccaaactggaaactacccaaatatccatcagttatggaatgatggataaattgtggtatactcgtacagtggaatagtatagggcaatggaaaagaacaactactgatacacaacatgagtgactctcacagacacaatgttcagtgaaagaagccagtcacagaagtgtacatgccatgtgactccattaacataaaaggtccaaatctaggcaagccatgctgcactgttacaagtcagaatggtggttatcccagggaggcaatgactggagaggcatggagctttaggagatggtcacattccaagtcttgatctgggtggtgattacatgagtatattctctttgtaagtattaaccaagctggacacttaagatatatgcacttttctatatactaaattcaattaaaaccttaacaatggctgtgacaattccactaaaacgattttactttgaagtctgcctttaaactggaagataagaatgggatagccgggcgcagtggctcacgcttgtaatcccagcactttgggaggccgaggagggtggatcacgaggtcaggagatcgagaccacggtgaaaccccgtctctactaaaaatacaaaaaattagccgggcgtggtggcgggcgcctgtagtcccagctactcggaaaggctgaggcaggagaatggtgtgaacccgggaggaggagcttgcagtgagccgagatcgcgccactgccctccagcctgggtgacagagcgagactcgtctcaaaaaaaaaaaaaaaaaaaggaatgtgatagaatccttcccctgccccaaggcttgaattctggcagggttgaggtttttagcatgagaagaaatttagagcatagcctttcatttaacagataactaagtgggctcagagatgctccctgatgtggccagtgtctcacagcatggtgccaagtggaaggcaccggggacatgagctctgctccctggagcagccaccatggaagtaagagaggtcgggggaggactgtacgtggagggaggacttgaacaagatcgcaaaggatggagatggcctaaaagtgagaacacaccattcatttgtgtgctcatccactcattctgctgggaaaatcctctgggtgcttagagttcccatcaggctctgtgcagacaggtgcaatggccaaggcaagtaggagtcaagatggccaacagattcagaagtggggaggactctggaggagcaatctggcaagactgtgtggaggagggagcatctgaactgggctttctggagaggtaggagttcagtagctgcagatggcaggaagggcattctggatataaggactagatcagagcaaatacaaagggtgaaaagaagccagccttcccagactcagggtcccctggccctcctttatttagaggacatgagtccaatcagaaatgcatctgcatcctccccagccggtggggcactgtaggagccacctgggtgaggcctcaggaaagtcattgttttccaaataaggggggcagactcagtgccattctctgactttttgtgaccccagggccaaaagctgtgtgctgagaacagtgaggcaggaaggagcctcggccccagagatgctgcagagtctacttgttgagtgaggtgtacagacatttatgtggttaaaccgctgagtggggtttctgttacatgcaacttaacgccctcctaagtgaggcagcatgtgaagtggacagggtagagcctggcacctagtaggcactctatacatcaataaatgttgaccaccgttaatccagcggcagacaggggaaggtatcagagaggacttgatcagcaccagaaaaaacaggtggggcagctcagaggtgaggggggaccagcaggacatcctgtggttgccagacctgccctgaagacgaaacagaagagtctgagtgtgctgcggccatgtgtgtgcatgttcatgtgtgtgaggctttttattttattttttagatagtcttgctctgtcacccaagctggagtgcaatggcgtgatcttggttcactgcaacctctgcctccccggttcaagcaattctcctgccttagcctcctgagtagctgggattacaggcacctgccaccacacccagctaatttttataattttagtatagatggggtttcaccatgttggccaggctggtctcgaactcctgacctcaagtgatccactcgccttggccccccaaatcgctgggattacaggcatgagccactgtgcccagccatgtgtgaggcttttacaggagttagcccagggcttgtggcagagctgggcacccagtggctgcagatgtgggattgtgtgtttgtgtgtgccagagaaaatgaaaaggaagaaagataaagcactaccaaaaaaacaaacaaacaaacaaacaaaaaacctagaggagcttgaaggcaacaggtggctggatttgtgacccagcccacctacctagaggggccacgtctccctcgttctttcccttaccctccctctgactgtgggcagaggcgcccatcgccacaccccccaaccctgcttttctcagtggtcctccaagttggggggttgcccacagccactccctgcctcctcacattggcccctttcccaccttcccacccgcctgccttccactttctattcacatagggtggggcctgcccccacaatagaggcagcctggcttgcctttttgtttgttttttgaggcagggtctctttctgacccctaggctggagtgcaatggcgcagtcccggctcactgcaacctcaacttcctggactcaagcaatattcctgcctcagtctcctgaatagctgggactacagttgcaccccacaacacctggctagttttaaaaaaattttgccgggcgcggtggctcacgcctgtaatcccagctctttgggaggccgaggcgggcggattacaaggtcaggaggtcgagaacacggtgaaaccccgtctctactaaaaatacaaaaacttagccgggcgcggtggcgggcgcctgtagtcccagctacttgggaggctgaggcagaagaatggtgtgaacctgggaggcggagcttgcagtgagccgagattgcgccactgcactccagcctgggcgacagaccgagactctgtctcaaaaaaaaaaaaatttacagagacaaagtctcgctatgttgcccaggctggtctcaaactcctgacctcaagtaatcctccagccttggcctcccaaagtgctgggattacaggtgagccaccacgcccagccagggcttgccttttggagctccactggtgcccagctggaaactcattgatgtgatttatttatttatttatttatttatttatttatttatttatttatttttgcgatggagtcttgttatgttgcccagggtggagtgtagtggctattcacaaacatgatgatcatgatgatagcgccctacggctttgaactcctgggctcaagctatcctcctacctcactttgtctagtagctgggactagaggcacttaccaccatacccagccacattgatgatctttacagaaactgagacttcaagctagaccagcaaccacctacttctggatgtggggagagcaattaggtagaatctgctagccccaggcagtgggaatttttttttttttttttttttttttgagacagggtcttgctctgtcgcccacgctggagtgcaatggcgtgattttggctcactgcaacctctgtttcctgggcttgagccaactttgcacctcagccttcagagcagagtagctgggaccacaggcacgtgccattacgtctggctaatttttgtattttttgtagagacggggtttcaccgtgttgctcagctggtctcaaactcctgaactaaagggatctgtccgccttggcctcccaaagtgctgggattataggcgtgagccactgtgcccagccagcagtggattttttaatgcctctctgataagagtgtttagtcatttctcaaagatcaaagcaggaaactaagaagaaaagggaatatgcttttctgcaaatcaaggtggactgaaattcggtggattatggctgccctagaataaaggaggccaaagtcgggcaatgtctgtctcttcctttcttctacctccctggaccctctcagacacagcagcactctgtgttgggagcctcccattgggcactcagacagctctcccatcttctgtctccaccaaacctccattggcagcttcctaactgctacctgtactgctgcataggctgctgcttcctacacaccacagctgggctttgcttattttgttacagacagggtcttgctctattgcccaggctggagcaagcaaagtggtgcaatcctagctcagcagcctgaactcctgggctccagtgatcctcccacttcagcctcccaagtagctggaattacaggcacgtgctacacccagctaatttttaaatcatttctttgtacagacagggtgttgctttgttgcccaggctggtcaccaacccctgggctcaagcaatccacccgttttggcctccctgttaccggtgggagccactgcgacctgccaagctgggcttttctcctgtgacccatcacctagaatcttgtccatgtgcagaaagaaaaggaaaccttcagactggctcctttaattaaatgttttcaggcatgtccttttaacctttctgatctcctgtcaatccctacattggctctaagcaataatggccatagcagcctcttgtatggcacttgctgtggatgtccttgttctttttttttttttttttttgagacagagtcttgctctgtcgcccaggctggagtgcagtgggacgatcttggctcactgcaagctctgcctcctgggttcacgccattctcctgcctcagcctcctgagtagctgggactacaggcgcccaccaccacgcccggctaatttttttgtatttttagtagagacggcgtttcactgcgttagccaggatggtcccgatctcctgacctcgtgatccgcccgcctcggcctcccaaagagctgggattacaggcgtgagcccccacgcccggccgcccttgttcttttttgaaacagaatcttcctatgttgcccaggctggtctccaactcctggctttaagtggtcttctcagcttggcctcccaaagcactgggatgccaggcatgagccactgcacccgatcagcaggccctgttctgagtgctttgcacacatcagctcatttgatctaatccacagccctgtgaagtaggagctttattattcccattttacacatgaggaaatagaggcccagtgggattcagcaactattctgatgtgacacatgtgtccttggaggtgtacatatcagtagatttcagcctctactgaaatcttctactgaagccttctactccccttgtgtttccctgtctccbccggtcctcttgtagtcatcccaagggctggcttagctctcttctcctggagctctggaaggccatagcatccctgcaaacccatccctgctcatcctccatgacccaaccctgagagctccctccccgccctatgcttggatgacctccttccccagtgctcccaatcccgacccaggaggcaccctcccctcagccatccttcaggaacatagtcttggctgggccccaggaggaccaggccatgtgtgatttgtcctttcaaacagccgcactgcctgcagggctgagagccaggaggccccacgaggcagaggaggcccagccacgtgaggcccctcccttcctgcygccccaggccccgctgactcagagcctggcagtcctcccagggttctgcgtgccagtaagcgctgggtggggccaaggcaaccctcgctgcgccccttggcacccacacagactcctcctgtgtggggagggtgggaacgcttcttaccttccgtcccataatcaactgtcttctttgaacaatagattgtgaataatttcacatcccggaacattctctctccaggcatgattttcgtggctgcaaaacagcggcttctccatcattacgcaactggcctctctgatcgtttccagattgctctcggccrtgcacctccttgtctaaactcygttctgcaccaccagcagtatcatggcctggggagaaggggctgtgtgctccattccaggatcaagactttgtagaaatcatgttttctagatggttgtgggctgttgtcagcagaaggactcaaggcaattaacatacagctaatgaactccaaagaggcgctttgatttttgaagaatctgacttgagaacaaatcaagactaagactaatatagcctcatctttcaacataggagagtcggaaaacaggctgagtctgcgacacccaaatgcctgccaccaccacatcccggtatgtgggttcagcacttgacagctaacagatctctttgctagatacagcaatcacattttctggttaagggagtgaaattaacatttaccttttttttttttttttttgagacagagtctcgctctgtgtcccaggctagagtgcagtggcgtgatctcggctcactgcaagctctgcctcctgggttcacgccattctcctgcctcagcctcccgagtagctgggactacaggcgcccaccaccasgcctagctatttatttttttgtctttttagtagaggtggggtttcaccgtgttagccaggatggtcttgatctcctgacctggtgayctgcccacctaggcctcccaaagtgctgggattacaggcgtgagccaccgtgcctggmcttttgtttttgtttttgtttkgtttggagacagagtctcactgtgtcgcccaggctggagtgcagtggagcaatctcggctcactgmaaacttcccctcctgggttcaagggattcttgagcctcagcctcctgagtagctaggactacaggcgtgcgccaccacatcaggctaatttttgtatttttagtagagatggggtttcaccatgttggccaggctggtcttgaattcctggcatcaagtgatctgcccgcctcggcctcccaaagtgctgggattacaggcgtgagccaccgcgcccagcaacatttaccaatttygatgagaatgtggaacactagaactctgggacgctgtgggtgggaaggtaacgtggtgcaaggaccttggacaactatgtggaaaatactaaagttaaatgtacacacggtaacccagcactccactcctgggtatgtttccagcagtttgtaacaggcccaaataatccatcgaggataggatgattatgttctatatcacaactgtggtgggggttacacaactgtatatatttccccaaactcacagaactgtacactcaaaaggggaaattttagcactaactttggcagcacatataataaaaaagggaaaacttaattttactgcatgtaagtttttctttttaattttgaaacaagccaggagcagtggctcatgcctgtaatcccagcactttgggaggccaaggcaggaggattgcttgagctcaggaattcaagtccagcctggacaacacggcaagatcctgtctctacaaaaaaaaaaaaaaggaaaagaaaaattagctgagtgtggtggcacgtacctgtggtcccagctactcgggaggccaagatgggaggatcacttgagcccagaacgtcaagcctgcagtgagccacgtttgtgccaccgcactccagcctcagcaacaaaatgagaccctgtctcaaaaaaaaaagaaaaaaagaaaaaagaaaaaaaaattcagcctgggcaacatggtgaaacctcatctctataaaaaaaaaaaacacaaaaaatattagctgtggtggcatgcactgatagtcccagctactggggaggctgaagtgggaggatcgcttgagcctggaaggtggaggttgcagtgagctgagatcacgccaccacactccagcctaagcaatagagccagaccttatcttgaaagaaataaaaataagtaaataaataatatatatatatatatatatatatttttttttgagaaggagtttcactcttgttgcccaggctggagtgcaatgctgcgatctcggctcactgcacctccacctccaggttcaagtgatctcctgtcttagcctcccaagtagctgggattacaagtgcgccaccacacacggctaatttgattttagtagagacagggatcaccatgttggtcaggctggcacgaactcctgactttaggtgatctgcctgccttggcctcccaaaatgctgggattataggcgtgagccaccgtgcctggccataaataaatattttttaaaagataagagaaagagagcgcgtggtaactcacgcccgtaatcccaacactttgggaggccaaggtgagtggatcatgaggtcaggagttcgagaccagcctggccaacattgtgaaaccccatctctactaaaaatacaaaaaattagctgggtgtggtggtgggcgcctataatctcaggtacttgggaggctgaggcaggagaattgcttgaatccgggagttggaggttgcagtgagccgagatcatgccattgcactccagcccaggcgacagtgtgagactccgtctcaaaaaaaaaaaaaaaattagctgggtgtggtggcaggggcctggaatcccagctaattgggaggctgaggcaggagaattgcttgaacctggaaggcggaggttgcagtggactgagatcgtgccattgcactccagcctgggcaacaagagcaaaactccacctcaaaaaaaaaaaaaaaaaaagaagaaagagagtaggggtatattcatacagtggaatagtatgcagcaatgaagaagaaacaaactcctgctacacaggacaaaataatgaatctcaaaatcattgtgctgggtgaaagaagccagacaaaagagtactgactgtataatttcatttataggaagctcatgaacagataaaactaaattactgtgacagaggtcaaaatagtagttacctctggagtgggggtaacccggagggagcctcctgaattgatggagatgtcctacatcttgagctttgtggtggtcccttgggtctacgctccatgctgaagatctgtgcccttgatgaaatgtcaattattcctcaattttaaaagaaaaccttaatttgtaaaattgtcatggcaaaagttaccgggtgaacaattcagacaatggagtggatgaagattcttcccccttccctccagacactactgttcccccaactggctctctgtgcttacgccagcctcatgtagctctctaaccatgtgagctggcagcacgtggctgctcggaactcctgcaggctggaattcctgccccaccctggccaaagctaaacaacttttaaaactggctggcagcctgggattttaaactgccttcctgcctgatccacttccctttagcacatccaggaagaaagttatagcttctcttgctggggggaagggagatgagacacctctgccccatccccctgaactttccagggcagagggggtcccgagtcagaaactgagaggcaagcccacagcaccccctttcccaggcccaggcccaggctcctgcttcctcagcagagatgtcagcaccagagccttttcttggggaagaggtgtctcctggcttgaccaatgcccgcatctctcccacaaaatgagctgaatacctgttgggtgggcttaggagacattatatctaaaagtgtctagagcatactaattgtcccatggctgcaactaagactctgatggtgagttacaatggggacagatgtggccacggacatcagcacctggcacaaagcctgggcattgtagacactcagcccatgtttcctcctcatcacgtggcctgatcccggagtgggaagaggacgctcacagcagaagtgaggctgcccagccccacccgcctgggggctctgggactaagatgggaggtaaggggggatgggatactcctgggaaggctgggatagctgctctgcttacatcttgtgtgtgccctggggcaagtgagtgccttctgtgagcttctgaagctgctttcgtctgtgaaaccaggagggagggtggcttcacaagactccctaagcacttagggtggagcaggcatgccagcatgatggcgcccggggcccatcctctcccctcctccatctccctttctcagggatctgcacagctgtttccccttttctgggcaaatcctctcaccaaataaacatttgcctttctatcgctgcctgctaggtggaggggacttctgaacccttgaggtcccttccctccctgagcacagcccagccccaagaccaaaaccacaccccaataactcccacctattgtgcccttgcagagggctctgaaccaggagtgaagaccaagctcttgggcataagaaacttgagagaacaagctagagatagcacaagtgtcctttagactcagcatggggatctggagtcccctttttctgttctgataggaaatagcctccattttcccatctgaaaaacggggtggataatcattgcatcacctacttcacaacatagatgaactgtcccagaaagtggtaatcatgcctgacatgtgtgtgcactctgtgtcaaagacagcatcttatatatacagatataaaggagtccctcccatcacacagctcccatttgtgtgtggggggctggggggagggtcacctgcagtggtattcagggaggatttcctcagagatctgggtttggcctgggctcccagattggccctttcccaatttcttgagggaatgaggctggcgagggcccaaatctcaaaaggccatgccaggagtttttctttttttttttgagacggaatctcattctgttgcccaggctggagtgcagtggcgcaatatcagctcactgcaacctctgcctcccagattcaagaaattcttctgcctcagcctcccagttagctgggactacaggtgtgtgccaccatgcctggctaatttttgtatttttagtagagatggggtttcaccatattggccaggctggtctcgaactcctgacttcgtgatctgcccacctcagcctcccaaagtgctgggattacaggcgtgagtcactgcagctggctttaagtttatcctgaggacaatggggagccactgatgatccttgagtgatgaggtcactcttgccttttggtgccgagtttaggaagggcaagcctagaagtgcttgggaggccaggtgaggggaaggaggggttgaatccaaagtcctggcaggagtgtcacccaagagatggaagacattgggagaagaagggacaagagcatgagggcacctctccagcaactcttcctgcctttgctgaccctgtctcctaccccaatcccgccattggcgggcttctggggtcttgcccagggccccacaggacacaatgctggtttctcaacttgctcagtgctttattgaaccaaggccctaacagatgactcagcagggccttcaagcacagccctgcccccatcttgagattcagaatccagagggtgctcagtccttggtttagctgcttctgtgacatttcctcttgaatagctccaaaccctaagtgtaaatatttttgtccacacaaataggcacacatatattcctgctgcaggctgtcatgctcaacaaaacgctcccacctggtttgggtatgcaaggcactgcgcatccacggccatccacggccatccacccatccatccaaccttccatccatccgcaacaagacagcagcaagttctgagcagtcaggccccagggttcacagcagtaggggctgggcttccagcaggctcatgattcaggccttaacccttgccctgggagcccccaaggataataacatccctttctggggcaacaaaactgggaccgagtgggtaactgatatttgacaggggaacctaaacagtctacggaagtgtcctgagatgggcgtaaagtcaaacagaccaagcacacaggtaacactgaaataggaaagagtaagagcttctgttcaggctggaggtgctcgtatggtgggacaggaaaggggaaaagagaaaggggcaacatggcagacataccacggttcctacagagattaggggcagccctggcccgggaagtacacagggcagagagctgactctcaggccaggaaggagtttagctctgacccatcctcagggaccacggctctcccccagcctcagctgacacacacacaaaggagcgtttcaggacacaggaagatgaagggttaaccctaacaaggaaacaagaagctcctggaggacacaaaatactgcctttaagctggtattaacccaacttaactaactcaacagactgggctcttccaggggtggggggcaccaggatatggaaaatgatgggatgacacaggggaatctgggctggggcagacaggcaggacacccacaccatctttcccatggacagcacctgaggcctccagcaggccctcagcccggcaggcccatagggcagctggcttcaggcctcgaaaggcaagggaggtagcaggactggcgcaggcccctcactggtcctgcagccggctacagagctcccgccggctccgctccccagcccagctgcgagtcttgaggcggaaggtctttagctcatccttgaaggcctcgtggttcatgggccggtagtcctggggttcacagaagttctagggcaggacaggaggggtcaatgcagtggaatgggtaagtttggcagggacccaaccctcccaccccccatcccatggctccagcctggccaagccaaccctcacacagagactgtggccttccccacccacgctaccgggtgctgagggaagaactccttgtagccgcctttcaggatatacatctcagggtagtagaggctggggtagtcgttgacagcacggtctcgttccctgatgaaacggcacctggggcgtcatgggcagggtgtggtcagagtggggcatgcagtggcttgtacatcatgggacctatcccccacgtcccctcctttgagggccttggggagccacagaaagctttagagcacaggaatgtaaccacaagaacacttttaggtcactctggctacagaagagggtggggaggcggaaggaaggaggtaaaatcaaggggatgaactctccgtttctagaaggcagttgcacaatctttgttagagatatctgtgcctggaccaggaaaggagaagcaggagaggagacaagtgggccaaattcaagggatccattcgggccactcctggacaagacctggtgaggatcagtggtggggagaagggaggaggaggacccaagactgaagccagtgcccaggcccggtgcccaggtggaggtgggtgccatatgctgggatgcctggagaagttgggagggccgcagggatgcgactctgtaaggggcgtctgggtgcagattcccaccacatgggtgaggccaggctggggagccactagcagtcatatggaccagtggcaacccaggaggaggcaggggtgggaggacagatggccaggcagaacaggaatagcgacagaaggagctcagccagggaggcccaggtgctgtggatgccaatggaagaggttctaatggagacctaacagcactgaacatggggagggtccgtgtactggggactgacacgcggcccttagatttcgagaaaagacaccgctagagacttggaactaaattttctgagggtggcagtaatggatgtggggtggacatgaggcttgataggcaggacagtgagggagatgggaggcgggtaccatgcacagtgaagtggggctgaggtcagctctaggccatcagatgggacagaggaggacctggacttgcacccctggccatctcaatggtgccagcacctgtgagcctgggcagggaaggccagggcagacactagctggctgggcggagctgggactcacatgcggggcccacgctcagatgagaattcacagtggaaaatgaggatgactctcttgtccaggctacagggcgcgatggggctcttcagtaggaagctctcggcgtcgcgttccaggggcaagttcaccgcagtctgtcagaggagccagaggtcaggcacagccccgggtccaggagtcagggccctccccgtgcagtcgctgtccttctcttagtaggaaccctccccatgagagggggcacccgtcctccacccattcaccctcttggcaaagcaaggacctaaaccaggtgggatcttcagggcctctccccattgccccatcttaccttgatgtgcccgccttcatattcataggggtatctgcagtctacaatcacaaacttatccacgatgttgctgaacttgcccgtcaatagggccaccatctgtaggaggtcatgggggttggttccggcaggtcaggctggcagctggcaggtggccctagcctgtccccagggaaggtcaacaatggagctacagtcccaaatgtgcctagaaaatgacgcaacgctgtttaccgtttctggtgagatgtacttgaggtcttggtgctttccgtctactgtctgtaggaggaaggcctgaagggaacggaagggatgagggagaggggagaaagttaaattggtaagaccaggagcctcaaagaatgaagtttcattcccaaaatcagaggccacacctgctttggccttcaaattcagttctggttcccatggcaactgagaggcacctcttgggtctgacacccagggaacaaccttccaaggggaaagagaaatgaaaaagggaagtggaagagatgaactccacactctgctccctaccctctgccaagcccgaaggtgaggcatgagggggttccaagctaggtatgagcttggaaataagacggagactcaacagatgcctggactgacttgaggtggagtcaggagacaaggagggccagagggaggagtctatgtgagaacaaaggatgaaaagatacaaaggacaaagaaaaggggggctccggggagaaagggaggaacccaagcagcccctgggctagaggacccctagtcagtaagaggtcaagcccccaaggtacccccttcgctgctgcaggtaccttagagtaatctccaatcagctctcggt

SEQ ID NO: 97363 - DNA, 13002 bp, Homo sapiens
gttcagtagtgccatcttggctcactgcagcctccgcctcccaggttcaagcaattctcttgcctcagcctcctgagtagctgggattacaggtgcatgccacaatgcccagctaatttttgtatttttagtagagacaggattccaccatgttggccaggctggtctccaactcctgacctcaagtgatccacccgccttggcctcccaaagtgctagtattacaggctctcaaaaatgagctaccatgcccagcctaaattagtgtttttaaattatgtacaaaacaaaacgtggagttacaaactaaagttacaataatactagcttttagactcataattttttaagtgtattaatccctttaatcatgtagagaacaaaaagtggagttacaaactgttgttactaacttacactagcttttattaactgcccatgtagctttattaaggtcttttttttttcatacagctttgaattcctatctagtgttcttttgtttcaccttgcagggctcccttaagcatttcttgcagagcagatctggtggtaatgaactctatcagattttctttgtctgaaaatgtcttaatttcttcatcacatttgaaggacagtttattgaatgaatataggatggttgacagtattgtttttagcactttgaatatatcggtccagtgcctttctcttaacagacatatttgaaaaataaagagatatttgaaagtaataggatagaaaaattaaccaagtgatgtagtttggatgttgttctctctaaatctcatgttgaaatgtaatccttaatgttggaggtggggcctggtggcatgtgtttaaactatgagggcagatctcttgtggctttgtgctttccttacgatagtgagtgagctctcatgagacctggatgtttaaaagtgtagtgcatctctcctcccctctctctcttgctccggctcttgccatgtgagttgcctgatcccccttcacttcccatcatgactgtaaacttcctgaggtctcaccagaagcagatgctgtcgccatgcttcctgtatagcttgcaaaaccatgagccaattaaacctcttttcttataaattatccagcctcagatatttgtttatagcaatgcaagaacgacctaacacaccaagaaaacgaaaagcatatgaatgctagagtgactattttaatatcaaagtgaacttcaaggcaagtattataagatataaagtattatgagagataaagttaattttaaagtattttataattctaaaattataaaagggtaaattcatcaaatacacataacaattataaacatgtaagaatttaatatcagagcttcaaaaaggatgaagcaaacactgacaggactacagagagaagtagacacatccataattgtggcaaaagatttttacacttctttcttattatttgagattaaaatgagacaaaaagtcagtaagaatgtagaagatctaagtaacactatcaagcaccttgacctaattgatagttatggggcactacattcaacaacagcatatctttttcaaatacacatgaattattcacaaagatagacaatatgctgggccataaagtaagtctcgataaatttcaaaagattgaaatattacagaatatgttttctgatggcaatggaattaaattagaaattcaataagatatctagtgaagtctaaaattcttggaaattaaacagtgcaattctacataaaacattggttaaaccacaaatataaagtataattagataaaagttcaagttgaataaaaatgaaaatgtaacatatcaaaatttgtgtgatgcagcaaagaagtgttgagcaggaaacttaaagcttaaatgtttatattagaacaaaaaaaggttaaaatattgatcaaattctctgccttaagaagctaaaacaggaagagaaattaaaccaaagaaagaagaaaagaaataataaataataaaacataaataggaaataaaagagaaaatcagatgaaaccaaatgatgattccttgtaaacatcaataagttgatgaatcactagctagaacaataaataaaaagagacaacaaagtaatcaaaactgagaatgagggaatagaaagccagatactacagacattaaaatgttaataaagggacattctgatcaaatttatggcaaaaagttaaaaacttagataaaatggacaaactccttaaaaaatgaaaccaaattagacacaagaagaaatagaaaatcttaatagtactatatctattaaataggttgtaattattttaaaaaaagcaaaccttcatgaattaaaaacttcaggtccaaatggtttctctcatgaatcatatcaaatatttagagaagaaataataccaatcttacacaaagttttaagataataaagatggcggaaatgttttctaactcatttcattaggccagaataaccttgtcaccaaatcttgacaaagatatgtaattaaaaaaaaataaaaatagaggttggtattccacataaacatatatacaaagatccttgacaatatattagcaaataaagtagtgcaacatataaagagaataatacactatgactaagtggggcttataccaggaatgcagaatttatttaacattcaaagattaatcagtgtaatttaccatgttaatgaaatggagaagaaaaactgtaggatcatctcaataaatacaaaaaaattttaaaataaaattcaatactcattaatggtaaaaattgttagcaaagtaggaattaaaatgggctttttacagctgataaagggaatctaaaaatgatctacagttaactatacccagggatgaaatagtgaatattttcttcctaaaaacaggaacaaggccggaatgtgtactcacattaaatctaatcagcactacactggagatcctagccagtgaaataaattttaaaaaaataaataaagggcatacatatggagaaagaagaaataaaattgtctttatttgctgatgactaagtataaaatttcaaagaatcttcaaacagctactagaaccaatatattaattcggtatatttgtaagataatggttaacatacaaaaatcaattgtatttttatatgctggtagcaaataaaaatgtaaacaactctatatacaataacattattaaatattaaatacataagaataattttaccaaaagacctttacactaaaaattacaaaacattgttgagataaattaaggacaaaaaataaagagatatgtttatagattttcagatggaatatttttgaatatttaaaaacttgctagtagtctaccataatcaaaaagtgaggtattggttaaaggctggacaaatagatcactggaatgcaatatagaaaccagaaaaagattcatgcatatatagtcgtatgattttcaacaagagttcaagtcaatttgaaaataaaaatcttcagtgaatgatattggaatacttagatagacatataaaaacagtgaagttcagccctacttaatactacaaaaaaaattaattcaagatcaattatagtcccaaacatcaaagtaaaaactatgaaaattctagagaaaatcatagaaactgtttttgcatgtcagaggcaggcagatattttttatagcagacacaaaaagcacaaacattgtagaaaaaaatgacattagattttattaaaagtcatcatttctgcttatcagcgcactattaaaaaataaaaaggaaaaccacagtctgggtcaaaatattcacaatgcatatatcagacaaaggacttgtatccagagtgtatatgttatatatatatatatttttcacatacatatatacatatatgtatgtatatatacatgcacataaatcaataaatttctacaaatcaataataaaaagacaatataaaacagttgtgtatatataggagttggataagaatacatatatgtatattatcacacatacacaaatgctacaaatcaataaactcttataaatcaataataaaaagataactcaatattaaaatgggcaaacaaatagttactttataatagaaaaaatacaaatagccaagaagcacacaaaattgttctccatatcatcagttagaagacaaatgcaaatggaaaccacaatgagataccatttcatccccactagaatggccaaaatcaaaaagactgacaacaccaaatgttggtgggaatgtggaacagctctcctacattattgaggggagcataaaatgtcagaatcactctggaaaactctttaacagtttttataaagttaaatgaatataaattttttaacacagtaatttcactcctaggtatttacctgagaaatgaacctatgcctacaaagaaatggattcaagaatgtgtatagaaactttattcatagtagccccacactgtaggcaatggaaaatgttcagcaatagtgagtaggtaagcaagcagtgactcatataatattatgggtgaatctcagaaacataatgttaaaaataaagccatacaaataaacatatgaaaagatgctccacctctacaccaacagggcatctagaagagtggatctcaacattggctgcaccccgaaatcacctgaggagcattaaagaataaaagcctcatttcatctcaagagatttgatttgattggttgtatttggcctggacattgagatttttaaaaagccccttagataatttcaatgtgcagccaagagcgaggacctaggtctttaagggaatcctgggacaacttcagtgtccaccaaggaaaggaagccagatgaagttgcaaattttgtagccactgcaggtgaagaaatggctaatttttggaggaaaactgaggtgaagatctggatctattaagaccaagtgcctgagaggaggaaacagttctctggccccacagctggcagaactaagagccttggtggtgagctgctacaactgtgaagcctgtgaaccacgaagcctatcaagatttaaatgtctggtataccttgttttctcctgagtctttcagtacctgatttgaggaaagccttcctggctgggttcctgtgcaggaatacagacaatgccaaatctctacaaatttacctttcagctaggtgattttggtagggtctccaaccagagagaccaatacttggtaccaggcaaagcaccatcttcaaaggcaaattgggcatagccagaaagcccacacagggcacctactggcatccaggtcacctactgagcaaatatctgcttctcttccatcattatagagtaggtaaaagtgcatttctggatcagtgtattttcagacaaaacgacccctatcctctcgtgcctcttgaagttgaagttatgtggtacctcttgaagctggaattatgacataattatcattccaagtttgtctttgtttccatgaaaattgcgaagtttgaagaggattatatccttattgtagtagtgaatatttccaaaaatgatgctagcacaagttccgagaaagaggtttaacagtcatgttaaaagccaaacatattatcttgggatttagatattatttcagaagagatgatttctcatggtttgatttataccaataataagctatagtatataaaggatttacaccaaatacttaattattttgttcattttatcaaaacaaacctagggtaccaacattattcttgcctaggccatgtatagtgcttaattattttattcatctataagtgagttcattgatacaaagtggagagactttcaattgtgttttatagaagaaattggaaggctttgtgaggaatcagagttgtattcctgaagaatcagaggcatatttatgaagactcacaggcgtattaatgaagagctcatttcatgtccattctcagcacagtgtccgggaatctgccttgtggtcggctcttaccttcaggctgctctgagcccagagcagaatggtcatcacagctctcctcaacttggcattgcctgagatcaggayggctgcatgcccagagggacaagctgccattatcccaacacaaaccatcacccctattttgtcgcgccacagaatcagtaggggcacagagatgaaggcarcacaggatgatatcacaaagaagcagaaaaaggagacaagagacttgagggctttaatgtgggcctccaggctggggtcacgagagtttctggtatagaccttcattgtcctcatgtgccttcccagggagacagtcagcatcccagaagaaaccagaaacaataggaaaggaggcacagaccacagatagcagaagagaaaggaataaaataaattgagatctttaatctgccagttgagccttgtattgttattcatgaatagcacagttgtgactgtgaagtgaggtctgctaaaaaagcaccaaacacagaggacagtgcagatgcaggagcaaagaataatacccaggagcatctgggagatcttcctggagacccagcttgccaagcagatcaggaaggtgtgagagaaacggatgagcttggagcagtaaagcaggctgaggcaggcagcaagccagaggttggcttggtttgcaatcatccatagcatgatgatggcttggtagctgtggttcagtggttcactcaacttctggaagtgggtaagctggatagcactcakgaacagcagtccatgcaggaaaagccggctgatgctgagacacagcagcacacaatcactgttgctcagtgsctgcctcttcactacatcccaaaaattcaccaagaaaacgaaggcattggtcagaaaccccactgcaaactccaggactgaaatgaacagaaatgtactcctgacttcataggacacagtgcggatgcgagttagagtcaacatgatgtcacttctctaattggctattctacttctcttctctagttggctaatctaaagacctggttgccacccagtgcagaaaggtaaatgtacgttccaagccaggacctttccttcacaaagcatccagctctttgcctagatctatcccaaagcgagcgcataaaaagttctggcaggaaacttagagggatgttgtttctctagaacatctcttggatacacgtaagagcttatcatagggtggaagactgatggttctacctcttgggtgatgcaagattaataaatccaggtgttcctgtacaaccgccttcccagaaggccatagcacagcatcacggatgcaaacaaaacagggcctcaatttccccaatccagttttgcatgcccatctggacctgtgggggtggcgaagagaacaggatttgcttatgggttttgaggcaccctgcagcaggcaaagcagatattcttggtgatctaaggtttgaaatagagtctcttttcatttgcattccttctctcatctgtgaagtaatgactcttatcacagactgtgtttttaatatagataaatgcatggttcctttccatgtgtcagtgtatgattgcagttttatttgctgttgccaaaggtttcatgcaatcatcattattatgccaggcactgtgcctggcaaggagaatattaacatgaacaagactagcacgctgtcatgaagggagaggaaagggggcatagctggtttggattattattatgtttattttttaattagtataagttctggggtacatgtgcagaacatgcaggcttgttacataggcatacacctgccatggtggttcgctgcacccatcaacccgttatctatattaggtatttctcctaatggtctccttccccttgccccctaccccctgacaggccctggtgtttgatgttcccctccctgtgtccatgtgttctcattgttcaactgccacttatgagtgaatttcccccgataaatcctttaagagttattggtgctgccccattggtgtttttcgatactttctctttgtattttttatgttttcttttgactaaagctccttttttattattagtagtgacataagtcagtgattactaaagatgttcacttttgttttattctgaactgttcatacgcagatatttatgtagtccttatttgtgcatcatgatgtagcagttgtatttaattaattgtgtttgtgaccacttcatttgggtcattcatgcttacagagtgtcaaacacagaattctgcactttcaacttaagctaattttctccttgtcttcaccacaccaggtggcggtgttgcactaaaggtgtttagaaaagatgtttgcctccctaaaaagtctaggtagaaacttgctctactgcacaagcagagatatataactatacagttagaaccatttatatcaagattataatcttttattaaaaaataaagttctttatgttatttcttggaacaccagatccaatcttaatttttcaataatcaagggctctttcagagaaaggtaacacaaaccttcattgatacaccccctccatttgacttatgtacacacagtgtttgggattatctaagtaatctcctttgcagatagtccttagctattggctattttttgaaaaatggtttactcaggaagctaaaaacagtaaagtcaactgcaatgccagtaagagcagtggtaggaacacaaaagctccttatttgttattagtagtgatataagtcagtgactacatctttatcagatgtaattaaaaaaatcttagtccctggattttgcaactaaacagatgttaaaaattcttaacctatataaattggtgtttcgacttttgctgccatttatttttggagattggaattacattctttggattgatttttaaaaattggtctttgttagcttgacagaagaacactattattagtaatatcaaacctcattcccttaaaataccttgcttagatgtttccaatgactagagaaatggacataccaatatatgtttattaagagcaaaatatattccacctgttgtaatgggcattgaggacacactggtaaacaaaggcgtattagaggaactgaaagagcacagccttaaagccataaagcttaaagtaagccataccttactttagaggaaaaacaccactagatgacttcagatagcggagtgaactgaaagaaacaatgttgggggagagacaacggacaggaaacatacaattggggtagtgtcaataggaaacactggcagtggccatcatcaacagcactcaaaacagatgaaatggcacccaggaagtcgatgaggcaggaaggagctcggtgctttcacggggagaggggaggcccgcgtggctggcttgtagccacaggtgaggctggagggcgacttcttccactaccgtgtgattacaatataaagtaaccagtgattggctatctcccattcttcccccgtgattggctatctcctgttctccccctgccggaattcctaggacagcgagacaggtgggaaacaacagacctaggaggagtctctgcacctccaatctccccaaataatcgggcaaagcaatggactccagcttttccaggaagctccagctccccagcaaccgagtcctcccccatcgctatttaacagctcccaccaggtggcgccagaacactgcgaggcctggaattcctggcaggctcgcagtgcatcctcacctcagccgtttaaatctagcaataatggggttccgtatctcacgcaactgaaattttagactccacttactgcgttatgataggctgaatttccttgaatctcacagttgccctgcgaagaatgtagtgatatttccattgtactgatgagaaagtggtttcaggaaagttaaatagttaaatatcttggccaaggtaagtaacctagtgagcagctgggattccaaccgcaggtattctgatttcacctttggcgtttcttcctctgagcctaactcccaatctagagtacgggctggaggagatacccttgctttgataagacacctggtaacatttttttttttccccaacctcagccctatctgagcttttttcttactctttttttcttttttttttgcgtgggcagggggagtgcagttgcccttgtggactccctcaagatgatagctcattccattcccaggagatagagaaaaattgagtctggataggtttatatctcaggaggccactgttctggtaagggaaaggaatggggaaaatttcgctaggctcgttgaaagaacgtgtcgatgtatgcaacaggttaacatagctattcataagttagagccctagagcataaaaggaaattcttcagaatttttcaggtggatctgggatgatgtcttcctttactcccttcctacaggcttcctatatcttctttgcttccattatactttgttcacagcactattgtagcacttaccatatgtattaaaatatgtatttgtggctgggcgcggtggctcacgcctgtaatcccagcattttgggaggccgaggtgggcgaatcacgaggtcaggagattgagaccatcctggctaacatggtgaaaccctgtctctactaaaaatacaaaaaaattagccgggcgtggtggtgggcacctgtagtcccagctacttgggaggctgaggcaggagaatggtgtgaacccgggaggaagagcttgcagtaagccaagattgcccccctgcactgcagcctgggagacagagtgagactccgcctcaaaaaaaaagtatttgtttacatgggtatcctcaattatattgagttcttcaagagtagggattatgtattgttctttttttttactccttattgtatatgacaagtaattagatttttgttggtttatttggccattcactttaaatccaaagtaatggtttgaccaaccttgctttcttatgaatataggtatattggccctgcttcaatctaggtgaattcactcttcggattctttttatatttatttccttttatgagacagggtctcactctgttgcccaggctggagtgcagtggtgtgatctcagctcactacaatttctgcctcacgggctcaagccatcctcccacctcagcctccagaatatctgggactacaggtgcatgcctctatgcccagctaatttttgtattttttttgtagagacagggtttcaccatgttgcccaggctggtctcaaacccctgagctcaagcgatctgcccgactcagcctcccaaagtgctgggataacaggcgtgagccaccgagtctggcctcctgggattctaacatgttttctgcactgaagatcaaaggctgaatgtctttgtaacccattatgtagccattcaggacagcactcatcctaagagaagaaaaaattaggtagtgaaatcattcattaacaaaactgtaggcaccaaagtgtaggcaggctcttgttcgggggacatggtgtttgctatgagggcttgtcctctgttccagtctgatggatttcagtctgaatccaaagaacagtttattaagtaagcccttttggctgcaagcagtaaagattcattcaggtgagctccagtaatatggatttttataggctatatcaatagttctcaaggcttaaggtgccccacactagggagatcaggatcaccaggggacttgctagaaatgcaagactgctgacctatggaataaaaacctctgaaggtgttcatgactgtgttctaacaagtcattcaggtgattctgacgcacactcatgtttgacaactactggggcataagagagaaagattttccaggacttcagcaatgagccatacttcacagagattaaacatcacttgggtgctgaaactttattcagaatccatgttggggtgtttttttagcagtaggagttaattgccattcacttgaatgctccactgtaagtgatattcagactcttgttagaaaagaaggcctttgatggtttagatggtatagtgccaagagtcccaggaattcccaaatccagctctgccatttattcctgttacctgagaagaacagtgaaagggggtataatgtgggtattactcttttaaatgtgacagcagcacccaacagctctcgctgcagagccctggtaccagttgggtttaagcaagcagcaggcctaggtagaatccacacacccaatttgccattctttccagggtagttactaccaatcgcctatgtggtattctcgccattatcagcggaacttctgtgtttgttaggcatgtcagtattcccaatttaaaagaactacaaatctcatccttctttcagataggaatgtccaaatgacacaagaaaaagtaattggatggaatttcttagaaagcccttgttgcatttccctttttctgtgcctgaacttgagtgttattgttggactctaaccatggggcaaaagccaagagaatctcaaaggcttcactctgaaatcttgatggctgaaaccacaccagcaactactcttttccagccttctcattatgtgataatgggaaattcttatgtccttaagccacaatgcttggaacattattattggaagccgaatgcaattactaacttatccaatatgaaacttacaccttgggaccagaatgcgcaagagtggagagagggagagaagaaatgggagcgggagagacacacacacacatacacacacacagagagagagagagagagagagagagagagagagagagattacttacccacttatttggagaaagagagaaagaggagataacttgcctgcatgaaggatcttggatctaattgcccatctaagcatgagaagccaagggtgaaatggagagaagggcagc

SEQ ID NO: 97364 - DNA, 17797 bp, Homo sapiens
actgcaaccgctgcctcccgggttcaagcaattctctgcctcagcctcctgagtagtgcccaccaccacacacagctaatttttgtatttttagtaaagatggggtttcatcatcttggcaggctggtcttgaactcctgacctcatgatccacccgcctgggcctcccaaagtgctgggattacaggcgtgcgccagtgcacccagcctaggctttccttttttaaaactcttttattttatttaccaatacatattcatgaaaacaaatcaacccacacaataaagcaccaacaagaaagacaaattaatcactaaaattgtagtacctcgaagtacagttgacccttgaacaatgcaggggttaggagcaccaactctcatgcagtcaaaaatcctcgtatacatttcgactccccccaaaactttacagtaatagcttgctgttgaccagaggccttactgataacataaatagccaattaacacatatttcatatgttatatatgtcatatactgtattcttaaagtaaagtaagctagaaagaagaaaatataattaagaaaatcattaaagagaaaatatatttactattcaccaagtgggggcggatcatcatagaggtcttcatccctgtcttcaagtggagtaggtcgaggaggaggaagaagagggattggtctcactgtcccaggaatggcagaggtggaagaaaatctgcatataagtggcccacacagttcaaacctatgttgttaaagggcccattgtgcatccagtccttgtctcaaactgaaggctcggccttgttctaatgctattgtctctaagatattcccttatatatttacatcactgctccactgcaacgcactgctaagatgcttacaccctgtctccgggggctatggttgccctagttgaggaggactcagtggcagaagggacaggagttcaccgacaactgaagccctgtccccggggtgctctcttgggtgctggtgactcccggcatcccctcttgggcatattttgaggtctagagaaccattttgcccaatagtggctgtcagataaggtctgtttggcagatgcctgcagagctgtgtgcctgccaacagacatcccctggcttccatcccacccttcccactatgaggagtcagagttggtgtttggctgaccacaaggaacccaggcagaaaagtcccctaagcctactgcagctctgtggtgtggctgagtgggatgctcagcaggtgtttggggagaagggaaggtggacaccctgaaggcctctgaccctacgtgaggccaaggatgggtgaaaaagtgtagcatgaatggcagctgggagagcacagagcccagggtctaccctgactttagggggcctcagccagtcagactttgaataacaccagctacactggggccccaatttctgtggccccctcccatgacaaacaaggcccattggtcaggacgaaccagatctgatgcaggaacaagtggcctgccaatctcaggggctctgcccatcacagtcacttagcacctcagtacctcagcacttctccacttgtgggctggttgggcttccttgcagcatggtggccatgctcgatcagggcagtcagactgcttccacggtggcccaggagtattccagagagccagcaggaagctgtcacctcttcatgacctggccttgaaagttacgtagcatcactccaccgtaactttggtggacaggccactaagtcaggcccagaatcaaggggaccaacactgactccacttctcggtgggtggagctgtaaagccacctcacaggactgtcatgttatttatgagctaatatctgtaaagtgctgagaaccattcctcacagtaatgcaatttatacaagtgtttcttaaagaaagcatactgctcatggatttgaaaatcatgtctcagtaagctaactccctgtttgatatccagaacattcctgcatcacccagtgggggaagcaccaaatcctgttgctctttcactgccatgcaagtgcctggccatggaagttggagtcagaatccttgtcacaccttccaaaagtttcaccagaggttcagagaatccagagagggctggatctccacccttccagggagagggaacaaacagtgggcttcagcagcctgactcaggagcaaattcctagatgactctacctggaacatggcacactggggctcagggctgtgaaactcagagcaaaaacaaggccagtgttgactgaggctctcaccctccactgcacgttcaaaccatctggagaccctcagatggctccacacctggcctctccccaggcagagctctgaagtgggacctgggcttcagaattctgaaacctcccaagcgatttcaagacacaccaaagcctaaaagtaactgaaatgatgggtttccgacgctcctgtgcttgcgagtcacttggggaccttgttaagatacagactctcactcagtggggccggctgaaattctgcattgctagcaatctcctggcaatgttcatgcctctggtctgtggaccacgctttgagtagcagaaaaatagagcagcatttcttagtcttgtcttgtctttttaactctatgcttcccactgattaatgtacaaatcccatgccttcttttaatattatttgaaaactgcacagtaaattaaatattgcaactaaaaccaagtgttaatttgaggggacaaaattctgcattgtttgcacaactcacttctgggccttcccatcccaccaacacctacaatctgggaaaacaccctgttgcaaaaacaactggaggtggcacccatccggcttcacccaggtttccaccggctccttcacccggcacctaaaggactcaccacccaaccccctattggggtcttgcttcacccatcaacaagcaagataatgtcaggtggcctcaaagggcctttccaatatcactagggacttttgatcttaaatcatcttttaatcttttccatcccatggatcctcggcctcctctgtgacttccaggaaagaagcaggcctccaaaagcattttctaccacaggcacttgtgcctagggactttcctgacaaggacatgaacaggcacatcagggttggtgaccacaccataagatgctggcaggaacaaggcctaggccaagggttgaggaaactatctataagggctagatggcctctcaggctctgctgtgagctcaccactattcggctccacccctgaagcacaaagagccacagatggtgtgtgaacaaagggtgtgactgcgttccagtaatattcacttcacaaaaacaagcgttgggccggatttggcccacaggctgtagttaccggagagcagtgcttctcaaactttaatagcacagagatcactcagggatctagttaaaatacagattctgagaacatggatttgagtgcagcactgtccaacagaaatatgatggggccaggcaaggtggctcattcctgtactcccaacactttgggaagctgaggcaggaggatcacttgagcccaggagttcaagaccacttgaagcaatatagtgagaccctgtctctattaaaaaaataaaagttaaaaaaattgaccgatcagggcagatcacctgaaatcaggagttcaagaccagactggccaacatggtgaaaccacgtctctactaaaataaaaaaatttgccaggcatgatgataggtgcctgtaatcccaactacatgggaggctgaggcaggagaatcgcttgaacctgggagacggtggttgcagtgagccaagatcacaccactgcactccagcctgggcagctgagcgagactccatcgcaaaaaaaaaaaaattagctgagtgtggtaccacacgcctgaagtcccagctacttgggagggtgaggtgggaggatcactggagcccaggaggtcaaggctgcagtgagctaagattgcaccactgcactccagcctgggtgacagagcaagaccctgtctcaaaaaataaagaaatataatgggagtcacatatgaagtttaaaatttcctggtagagactttaagttaaaaaaaaagtgaaattaatattaataagatactttatttaatcgaatatacccaaaagagtatgctttcatcatgtggcactaaccacatttccagtggccatagtcatggttacacaggatcaagcctgaaagcctgcatttcagacaagctcccaggtgacaagaatgctgccagtccagggacctcgctttgtaggaagggcccaaagaatgctatcttctacctgggctggtgagacagctgtggagcttccacacaattttctacaggacacttggcaaactgaatatgtatcctaagataggaatgcttgaagtcacatcttagggaacatccagctcattgataccatccttgtgcgtgattatcaagtaatctttctcaaacactctcaccaggtattttacacaaagcccagtaaatgggggccctgtctcctccatatcacacaaaggaaatgacatgtgtggataaggaatgacaggacaagtgtgtgctggcgccatccacggcctttacactggcctctccaagaagttcacagttccatgagcaaggcttaggaattcccattttacggaggaggaaccaatctccaagcttaagaagctgcagctagaaatgagcaaccctgtgcctgaggcccaagtccatccatttccaaaaggctaggctcataatccaaggagtgcagcatacaagatgccgccaggcatgagtcacagacatttctatttcaatatttttaatagaacatctccagtttatcaaactcgtgatatgtcacagacaaaattgcttaccttaagctgaggattattttaagaatctgtttcaattttatttattttttaagccaagaatttccagtttttatttctataacatgacttaacaagaaaaacattcccccaattttttaaaaattaggttggattaatttacaatatatgaatcaacttaaaatatcagcccttttatttagagccaaggatgctattttaacagcagaattgcaccattgatacttttacctatatttgatggcacagatatgcaaaagtcatacgacttccactgacaccctctcctccctccagagtagcattcacgtaatttatcttaggtcagttacaagttatatgtaagaaatggttaagtgggctgggcatggttggtggcccatgcttgtaatcccagcactttgggaggcctggtggggggtgttaggtggggggaatcgctttgagcctaggaggtcaaggctgcagtgagctatgattgccccactgcactccagcctgggcaccagcatgagaccctgtctataaaagggaaggggaaggggtggggcaggggaagggagaggaagaaaggaaggagagaaagaaaagggagaaagagagggaaagaagaagggagggagggaggaaagaaggaaaaaaggaaggaaggaaagaaagagaggagggaaggagggagggagggaggagagaggaaagagagaaagaggagcgaaggagggaggaaggaaggaaggagagagaggaaagagaaagaggagggaaggagggaggaagggagggaaggaaggaaagagaggaaagaggggaggaacggaaggagggaaagagggaaggaaggagggagggaaggagggagggaggaaggaaggaaggaaggaagctaagcaatataaccctgtgcaacatttgtaaaagtgactctgagaagacagaaagatcctctatgagagactggtgtccccaggaattggcgaggcctgctgaggatcatttgggtaaatgtcatggtcacgcggccccattctcttcgctgagctccggatttccgtagccaattgtctgctggacattcctccctgatacatctcacaggtaacccgctccaaagtcaattttagggccctcctccccactgcgtccgtcctcctgctctcctggcctctggaatggtccccgcccagccagtttctgacaccagacgctgtcctgggcctcgccccgccttcccaccsccacccaaacgcgcgtactctcggcctggcctgcgtaggcccggcccgcacccgccctgccgggctcctgctccattgctgccccagcccacgtccctcacggctagaccctgagtctgtcacccgttggcagcrcccagaatgggccaagcaccctccccgcccctctccagggtgctgctggcctcgcttccgcggcccctcccgcgaggcctacccccacccccaccccgcggcgccccttggttctccttcctggcccctggcccccactttacatcctgatttgtaaccccgcagtgactaacatagctcccacctcctggcctgttcacgggggtccccaggggtgcgcggaccgtgcgggggtccccgcggccaacccagcgccagaagcgcagggagcacgtggcaaacggtggggggaacaatcaagacggacccaaagcggttgcagcagagagggaggcatccaatcccgtccaccagcccccaaaggccgtcgtcctgcctggagaacctagcagtgctaggcaaggttcactagtaaagaaaaatatctgaccggctccagctccagcccaagctgctggtcggggcgagaggcctggggacctgtccagggcaggagcccccgcactgcgggggaatcctcctactactgcacggggtggagggggcgggccgggggggaacatgcaggccctggagccccactcagaagacgcctgagcagaggcgcctcggctctacccagctcagcccccgcccccgcactgcacatcccctctgtgggcttccatccttcctccccttcccccccaccacccaaactgcccccagggctctgctgaggcttccctgctgtctgggcaggggctgttggttcctcaggagcacgccgtgagatgagcacccagggagtgacgaagggggctccaggggatactggggagggcgagtcagagcagggcccagaggggagcagcaggcagggcacaatttcgggccagttccggggcagggtgggtggagcccaacccctaggggaactcggatcctaatgacaccctcaagtctgcccgtctgcccgggcttcttactcccactctggtcctcttggccaaaggcatgaggccgggaggacggcgatgaggatcaaaacccctgggtccttcctgcctctgcgcctgccagcaaaacagctccatgagtccaagggcagctcaagggcaggccacgggagccacaggtcctggccatacagcaaaaacatacggaagccagggcagtgcagacacagcaacaggacagaggggcctggctggagcgccaatgccaggggtctctcaaggcccgcaacacggtgtccttcttggactagagtctcagttaaataacaaagaggggatctgatgacgtccacrtgggcttctccctgcctttggtggcgccccggccctcctgtgcgtcctcctggccctgctcagatcctaggagccatcacacactcaacatccccaggcagcaccagcaccaaagcccctcattccatagccctctaacacctggctcagagtgagctcagcttcttttcttcacacatgtcttcatggcagcaagggaatcaaaaactctcctcctggccacccacggaaatgcagctgtcaccagatggaaaaggaggagaagatgcagtgggcttgggtggtcccaggtggcccctggccggactctttccctcagttgggggacagaggctgattggaagagcacctccttcccaacgcttgaggacagggccttccctgacacctgtgcctgggctggtcttctgcacccttagcctcaagtagcctcagaccactgcagtgctgttgagggttatccatagcgtttttttcctgtgctttgggtctcctttgccatctgcagctggactaggggtcttggattgccagggaggcttctgtgaagtgggctgaagagagcccttcctcactcggaaggcacagcacagccccgccgcatttataagtgaaaagggagaccccactgtgatggggatccttctgccattcccccaagaccccgggattgatgagaggcattcagaactgcaaggggcatgagggggctgtcatgtccttgtctgggcggcctcccaggctcaaattgctgcctgagaacaggtggcagaacattcctgaatatttaacccttggctcgcaagagtgcaggaatgacagttctgtgcctgaggaaaagattcgtgtcactcgcacctcacttaggacaactcgtgctttacagaaatttactaatgttaaagaatgatttgtggtttctttgctcaaatacaggaaactgacttttctcaaaaatgaactctccctaccaatctgcaccatgaaattatttcagcaaacaaaaaataatggttgcccatcaccgcacactgcgtgtgactcagccatcactcacaggcaaagaagggtgttctctcctctccctgtcagttactaattctctgtaaatgaccatttgacatcctggccggggaggattcagatcagagatgacttccccactgccacaaagtatggttctgggaaggacaaccagccccaaggccacgaaggttctgaaaaagtttcttctcatttgaagtccagtatttcctcggccccatttttctgttaaacaatccttttcccttggagattgctaaagcttagctccagggccagcctaagctccagcagaactgggagcgtctcctgtgtctacatagctcccttccctcctgccttcctactatcaaaggagaaacagcgtgtaatttgattttttccccttctcctcacttgccatactgtgttctttgcctgggcctgtgcctctccttgcagaggctgtggacaggagcaccgagagccacttcctggagcatgctccccacccccrcagcctgtggcttcagcctctgcttctgcagacagcggtggaggaagtcaggactgtcccttctgacctgaacacctacctccaagtcctccctgtcgccacagagacccggcaatgcaagtgagtcctgtttgacctcgtcaatcatcgcagactgtaaaggtgactcggatgctcaagaaacgagcatacccagcagtgggccccagacttctcgcaggcccaggtcctcctgggtgcacagagacctaccagacaacggtccggctgcactggtgttgtgagatgcctgtgtcagaagacactgagttcctcactcgcctcctatcatgccgatgatcacaggagaaagagcagggcacatgcatgccagcatgctgaagggaggccaaaacccatgcttgaaaaccacaggtcctgttctaggagcaggagatatatttagccaagcaggatgtttgtgggtaaaccaacattttgctgtaaataaaattctgcaaactcgggactttgagaattgcagaagcttactttgcctgcgtattggcaagagagctattttcctaacacaagctcaccatgaccctcattcagagatgcgcttgacgccgagggtggtgccttttcgctaaggggtgctgtcaggggattgagtaggagcctgaagagctaggagtatcttctccctgggcagaccagcaggcagaccctgtcccttcacactacagtggcacgtgatgggccccactgcccacctggttctggtgtccaggctgaagtcctcgtgtgacactccaaactgttctggcaaggaaggctcacgggttctgacctacactctgaaactgaccagtagtgataaactccgcatggacttcagccatcattgcgtacgtaagaaatacgtgttgcacacagagtgcttctctacattcccaggtttgccactccccgacttttgctgaagcaggtttctactccatcagtcccacagatgtgttcacagggccagcactgagtgtggtgctggggaaggcatgtgcttggaggcagccctgtgagatggcacagcctaggggaggagtcgtggtggggaagaccctggccacgcatgatagaggaagcgtggccacacagtctttgctgtccctgccacagcatggtgctgtaagtctcctccttccgagtctgtgcagacttatgtgacacatttgacccaacagaaatgcagcatttgtggtgtgtgaaagttccagaccaggccacagcgagctccgtggcttcggctgtgtctcctggagcacttgctctcaggaccccctctctcagagcccaggcaccacgccgtgagagagccccagccacagagacaggctacgtgtaggtgctttcatcaaagtgccacctgtgcctccccgcagcagtgtcaggccaccagcttgracaggcagctccagcctccagtggaggcttcagaggacagcatcaaacagcatccacaaaggagacccaccttgtgaaaagcgcctagccaagccctgcccaaatccctggcctgtgcaattgtgagcaaagcaattcaatttggagtggttttatgctgcagtaggtgaccaaagcactatggaagtgaatatcaggagcccctcactgggatgtcagaagacattcaaggaaggtttcctggaagatttagtacctcaggtggtacaggagaaggygagatggagagaaagcaaccccagtctgaagacgcagtggtaagaaagggtcattcccctgggcatgtgtggtctgctgggggatgacagccgaggtgaacttgaagcagaggacactcagacaagctgcactctgaatcccgctacrctgaccgcagcacttgctgaagaagccgcctcgccacgcccaagccctgcagagggaaggactgaggaaggcagctcagaggcctcaggcagccacagtgtgcatgcttgtctatgactcacagctacgacgtggcctgtgctgctgcagctgctgataagcctcaaacctcatataccactctcttccgaggattttttaaatacacaaaactgggagtgagaggggtatttaattcccctactaacacatgttgggcgcagctggagcagccaggcccactgtagctgggaagatgcggtgccttgaggtgcaggcactgctcactgccacatgtgagcacaggttctgagggtgaaaggtccctggtatctggccagagtgttagactctggaacataagaagcccccgaggtggtggagaaggtctagccaggctccagactggcttcacagaggtaatgctttttggtttgaaatccgtaagagcgcactacaacttcagggcaagctccaacagtgcttctcaaactttaatgagcacccaaatcatcagggggcgcgggggcagtgggtcgcttactaaaatgaagattctgcatcaggaggtctggggcggtgacacgattctgtgtttctaacacgttcctgggtgaggctgaagccactagtccatgaagcacactttgagtagcaagaatgtggaggaactgtcccaggatgggccatgatttacctgaattctcacagtggcttagacaatggagaccttgtccacaactaaaaaataaaaataaaatcgaaccacactcattgttccaggaaacagcaataacattggaaataaatcaaatggtttattactgagattgtattatcagagctatatattaatttttttttctttctttcttttttccttttttgagacagggtctcactctgtcacccaggctggagtgcagtggcatggtcactgctcactgcagcctcgagttttcgggctcaggtgatcctcccacctcagcctcccgagtagctgggactacaggcatgcaccaccacatccagctaattttttgtacttttagtagagatgaggtcttgccatgttgcccaggctggtctcaaactcctgggctcaagtgattcgcccacctcaggctttcaaagtgctgggattacaggtgtgagctatacccccccaccccacccacctgtatattcattttctataactgtgtaacaaataataaattcctattactgtataacagacttaatagcttaaaacaacacccatttatggtctcataattctgcaggtcagaagtccaggcgggtttaatggggttttctgcttggagtctcacaaggccaatgtcaaggtctcctatctggaggtttggggaaaaaaatctacctccaagtttaatctggttgttgggcaaattcacttccttgcagtcccctgaaatcctcattttcttgctggctgtcagccaggggttgctctcggtaacagggacctcccagggcctcctccatctcaaagccagcaacagagactccaccctggtgtcaaatctaactccggctctgttaccagccagagaaaactctgcttttaaagaacttggccgggtgccgtggctcacacctgtaatcccagcactttgggaggcagaggcaggcggatcacctgaggtcagcactttgagaccagcccggccaacatgatgaaaccccgtctctactaaaaaatacaaaaattagccaggcacagtggcaggtgcctgtaatcccaactactcaggaagctgaggcaggagaatagcttcaacctggaggcagaggttgcagtgagccgagattgccccattgcccagcctgggcgatagagcgagactctgtctcaaaaataaataaataaataaataaataaataaataaataaataagaactcatattaggccccaccccagataatcttccaatttttagatcagacaattagtgaccttaattatatctgaaagagtcttttgccatacaaggtaacataatcatgcgaataacgccagggggcttggttctggttccagggccaccttagatttctgccctccataagtgggaaatgggtgccttaggcaaaaactgcccgataagaatgcaacaaccattacacaactaaagtgggtgatcttcaatgacataatcagaaaagaacctgagatcagtttctcactcaacaggatttatggagagaggccaacaaaaagtaaggcctcaatttagcaaactgaactaaaagccaagtctaatttgcattctttagaatgcttggggtcagccgggagtctctcccattagaatgcctggggtggcccaggtgtctctatcattagactgcccgggctcggccgggagattcctagaacacactgggtcaagtaaaataacaacaaacaaacaaacaaaaacctttagaaacatttattttatgttcactgaaaacacttcatcgcggcagcaacttcaattatttagtattttgcacctccaaggcaaaatttcataaacaaacaggtgatgtttcttagaaaacgaactgtttatatttagcattattttctttctctcatgccagtttcctggagggcatctctcacaccaatttcctagagggaaaagtttacctgcaaagctagaaggggcttaatgccaacattccctgatgcacccagtgagaacatgaagagatgtggatttcctctccttcccttattaattgttttgtgccatttagagcaaatttgatgcataaaactctaattcaaaagaaaatgagtttttactttaccaaaagtgtaaacctttttggctgggagcggtggctcacgcctgtaatcccagcactttgggaggccgaggcgggtggatcacgaggtcaggagatcaagaccgccgtggctaacacggtgaaaccccgtctctactaaaaatactaaaaaaaattagccaggcatggtggtgggtgcctgtagtcccagctactcgggaggctgaggcaggagaatggcgtgaacccgggaggtggagcttgcagtgagcggagatcacgccactgcactccagcctgggcaacagagcgagactccgtctcaaaaaaaaaaagagtaaatcgttttgtaaaatttctaggaattattctcagcctaaaacagtgagttgtatacagtttctattaattgaggtttgaaatgtacacgcatagtagcacagtgggtgaaatgactgatctgaagtgtgccactcactgaatctgctcatgtatacgttcacgtgagcaccactcagcttccccagatttccttgctatccatcccagtctataattacccccaaccagaggcaaggcagcgttttagaaactttattgagggtatgatttctgtccagtaaattgtgtccacttcaagcttccagtccagtgagtttgactatgtgcacactcaggtcacaaaccaaggtcacaatcaggaggcaacacaccttcatcacccacaagggacacaccttggtcacctttgcctcatctcccaccaccctgggcaccaggacaccacacatctgttttttaaatcactatagattagtttgagttgtttaatttgtgtgtaagagaaatcatgaaggatatactcttttctggctagcctctctcacccggcatagtgatctggagattccttgatgctgtggggagtataaagagttcattctctttcattgctgaatagtattccattgtatggatatacaacagtgattctccattcacctgttaatagacatgtggggtttttccagtttggggctactgtgaataaagctggtatgagcattcacccacaggtatttgtgtgaacatatgttttatttattctgggaaaatacccaaaagtggcaaaactaggtcatatgaaaagtatatgcttaactttaagaaattgcccaatagtttgctaaagtgtttgcatcatttacactcccaccaagactgatttggtattgtcggtctgtaattttagccatcctagtggacgtgtagtgatctctcattgcagttttgtttgcaattcacagacaactgatgatgttgaacatcttttcatggtttttttggccatttatatatgttatatttgttggtcatttctatatcttctttggtgaagtgtctgttcaaataatttgcccatgtatacattgtattctttgtccttttactatttttgttgttatttaatatttattttataatcttaaacttaactctgcaatccagctagaactggaggggaataaggaaaatatggaacctaaagaatgcatcagctgggcgcggtggctcaggcctgtaatctcagcactttgggaggctgaggcgggcaaatcatgaggtcaggagttggagaccagcctggccaacatgatgaaacactgtctctgctaaaaatacaaatactagctgggcatggtggcgcttgcctgtagtcccagctactcaggaggctgaggcaggagaatcgcttgaagccaggaggcagaggttgccgtgagctgagatcgtgccactgcactccagcctgggcaatagaggggactccatctcaaaaaaaaaaaaaaatgcatcgatagcaaaagatgataggctactgtgagcaaatggggtggaggggtggtctccaggttacagaaaaagtagtctggtggttaagataaaggacgagtcaaatgtattagactgtccagagtcagcaatggtgatcttcttgctggtcttcttattcctgaacccaaagtgctccatggcctctgagatattcatgccttctttcaccttcccaaagaccacatgtttgccttctaaccactcagtcttggcagagcagatgaaaaactggaaaccgtttgtgttgggtctagcatttgccatggaaagatgacaggacctgtatgctttgggatgaagttttcatcaaatttctctccatgaatggactttccaccagtgccattatggcctgtgaagtcgccatcctgacacataaaccctggaataattctgtgaaagcaggaatccttataaccaaatattttctctctaatgctcagagtgcaaaagtttcttgctgtctttggaacttggtctgcaaacagctagaaggagacacaacccaagggctcaccattatcggtgatgtccatcatggttggtggcagggggccctgggtggtggcagcatctgcaaaaaaagcctgtccttttactattttgaggtttttttctttttcttttctggagacatggtctcactctgttgcccaagctggaatacaatgacatgatcatagctcactgcaggcttgagctcctgggcttcagtgatcctcctaccttagcctcctgagtagctgagactacaggcatgcaccaccactcctgactatatctttaatttttttgtagagatggggtctcactatgttgcctgggttggtctcaaacccctgggctcaagctattttcccactctggcttcccagaacactgggattacagatgtgagccactatacccagccttaatattaagatttaagcacaatttatgttttgtgattacaagttatcatcagatataggtattgctaatatttcctcctattctgtgacttgccttcatttcttagtagtgcctttgaaaagcaaaagctgtaaattttgataagtccagtttatcaattttttatggattgtgctttatgtatcctatgtaaaaaacatatgccactcaaggttgcaaggattgtctcctatgttttcttctaggatttttatgtgtatggtcatttcaagtgaattttgtatacagagcaaggtaagagttgatgttcattttttccttatgcatatactcagttgttgaaaaaaacatttctttcttcattaatttgagtgggtatctttgttaaaaattgattatctatggctatctttgcctgtctatgactatccctcttatgttcaagggcgctatgtatctaacatttcagtattaccatactacttggttactgtagttttgtaggaagtcttaaaatcaagtggtgtcagccctccaacttcttaaaaatgtctttgactaatgtaggtcctttatattttcaagtaaattttagaatcagtttctcaacttctacaaaaaattctttgctaaaattttgattaggattgcattgaatccatggatcaatttgagaactgatcaagtggattttacatgaggaatgcaaggatggttcaacatacataaagcaatagatgtgaaacatcacttaacagaattgagaacaaaaactatatgatcatctcaacagatgcagaaaaagcattttataaaattcagcatcccttacatgataaattgataacctcaacaaactaggcacagaaggaaaatacctcaaaataataaagcccatatacatcaaacccacagccagcaccatactaaatggggaaaagtctaaagcattccctccaagaactggaacaaggcaaggatgcccactttcaccacccatattcaacatagtactggaagtcctagctagagcaatcaagtgaaagaaataaaaggcatccaaactggaaaaaagtaagtcaaattatccctgttcactgatgatgcattcttacatctagaaaac

SEQ ID NO: 97365 - DNA, 32490 bp, Homo sapiens
gaagggaatgctggagggagtggaggtctggactcaacccccaccaccgtccccatagtccttggaagaggtaatgtcctaggtgttcttttgagctctgggcctcagctagactgcccccttcagctgctagcagaatggacacacaataggaaggcgagtgccttatataacccaggactgaagaggaaagtatttatcacacaagcaaatcacaggaggaaccaatcagcagaaaccgccagtcagatggatcaatccgattaattcctttattcaaccaatcatgtgttgagcagctgcggtgagctcctattaggagacaggtgggctcggtggtgcctgctggttcccaacagccttgggcctccaggcggcttccacctcccccaccagggagcaggtctcaccaaacaagcaaaggataaatggcctcctatgggtggaagccgttcatcctttccaggcatgagggagtgtgggggactcccgcctgacatttcagtggtgcattgatacgctcgcatctccaggcccctgatgatgtcaaaatgttatgatcttgctgggagaagtgatgaatggagcacagtggaattaaatatagtcctgaaacaggatgtgggctcctgagcgtgtagtcatggtgacagcatccctgctgacttcactcaccaaaggggatacaggcacttggggggaaaaggcacctgtcaggccctcctggggacactgcccccagaatctctgtctcatcaagagactgaggatgttcaactttgtttactcattcactcactccatctatttacctagcacctattttgtgctagacatcatgaacatcacaggatgtttcccatctggagacagcaaatagtctaggagaggaatgagacataaataaatataatttaaaatgtgggtgcttattgtgaagtgagagaataaaacaatgtgagggagaacaaaaagagggattgatctggggagtccagggaaggccccactgaggaaacatttgaactgagaccaggagggtcagaatgagtcagtcaggtaaataggaggagaagagattttctagtggccagagcggtctatgcaaagggcctgaggcaagaaggagcttggggcatccagggaacagagaccccagcgaggttgcagcaaggctggaaacaccaccaggactgggtcaggcgggaccacgagggctgtgccaaggtctagcagcttaacaagggcagtaatgggccatgggagaggttgaagctgggttgtgatgccactgggatcctgtgtttaaagatcctctgtcagcagtgtgcagagtgggttggaggagggggcaggaagggagaagagtattccaggaagaggaagcagctcacaggcaggtcaggcagaaggcgtgggcggacatgttccagcaactgcaggagcaggtagctgggagccgtgagggaggggaaggcaagggtggggatttggacggggatttggacagggccatgcaggcttcatagctgctggttcagagtatgactattaaatggtgagagaagacatgatccattttttaagttccctttaaactcattcttactttgtccaaaagccaccagtgatcacagtgcaaggaggctcagctcctataggatgggggaagggatccaacagaaaacggtcccagcactaacctttctacctgtgtggcctcgagtgggctcccgaacctctctgagcctcagctctctcctcaagaaatgaggctgaggctccctactccataggctttagagcgggcctgaggagctcagatgtgtggcgtgggggtcagtgctatcgtccatgtcattatgtgtccatttaccttgtagacaaggagccaccacaacattccaggaagcagaagggtcaggagttgtcccttttattttccagatgagaaaactgaggtccagagagggggagtggctctcccaagggtggcaggtggtgggcagtgcccaggagatcatgaggtgtaggatggtggagtggttagaactggccctctctggagccccatggacatacattccaaatctcatccctgccactcaccagctggtgcctgggtcggtggcctgacctctctggaactcagtcacctcaccattttttatttttttatttattttttttttttgagatggagtctccctctgtcacccaggctgaagtgcagtagcatgttcttggctcactgcaacttctacctctaccttcaagcaatccccctgcctcagcttcccaagtagctggaactacagctgtgcgccactacacccagctaatttttgtatttttggtagagacggggtttcaccatgttggccaggctggtctcaaactcctgacctcaagtgatccacccgcttcagcctcccaaagtgctgggcttacaggcgtgagccaccacacccggccagtcacctcatctttaaaatgggctttatgccctcctgttccatgaggtgaggatggacaagatggtgctagtgaggggctgcaccactcctggcaccttctcttcaatgctcgttcaatggtaattttggtgacaggacctgggacttcccccagcctggcagagggttcacagtggccgaggctgcacccatgtttgttagggtggaaactgcttaataagctggcattaaggaagcacatcaggagaaggcaggaggacaatgcctgggtagaaatcactctccccactcagggagcagctgccctgagcccctcacacttgggctcctcttctccccttggctcttggtgggatccactgtcacttctgcacagggataacaataacaataatgataatcccaatcctcaaatctgtcctctcagcagagctttgcctgcaccagctgtcgctccgtccccacctcccccaagagagggctgctaaaggcagagtctttgggcaggacgtccaacaccaacacactgtgtgactctggacaggtcctttcccattctggccctcaatttccccttctgcacaacacaggtgttgaactacatactcctaggggtaggaagagtcagtccatttgagccattaagttctgtaaagatgttctgggaacgtgcatgcatctgccccctcaactcccactcccccctgacctcatcccctctcctttccccagcacaaagctctgcccacagtgaccttctgctattccccagggccttttcacaggctgtttctcctgcccaggagtatgcttccctcagctgtaagcagggtttgaccttcagttcattcccatccctgctcagatgtcccctaaagtgtcaccaacccccatctatcactctttgactccctaaattgcttttgtcccctcaaaatactcgtgttgaagtcataacctctagtacctcagaatgtgactgtatttagagatagggcctctagaaggtgattaagtcaaaaatgaggccctaagagattaggacacacagatatcaaagtggacacaaaggaaagaccacttgaggacatagcacaaaggtggctagccaaggagagagactccaaagaaactaaccccgcaagcaccttgatcttggacttccagcctccagaactatgagaaaatacatttctgttgtttaagccacttagtctgtagtgttgttatggcagccctagcaaactaatatgtccccactacatagtactgatcagcccctggcatttgtcatatattcatttgttgtttgtcccctccctacaccatacactagaatgtgagctccacaaaggcagggacttggcttattctttatccccagaccacagaacagcacctggaacatagtacgtccccagtaaatgaagaaagtggagccagacatccctgatttcaagttctagccctttcactccttcatggtgtgaccttggactgccccttaacctctctgagcacactgtgtctcatctgtaaaatgcacctaatgatcacaccaaactcagaaaggcttgtgaagccatagcagacaaatgcaggcaaactgcctagcacagtgcctggtgtgcagcatattctccaaaataaaagatataattgttgctgttattgcaacagtagcaagttcgatccttcatttaaccctctacaaacacacattgacacctcttctgctgtctgatgctggagacagaaaaatcactctggcttctgacctaggtatgctcacagtttagtggaggagacagacgaggggacatgtgccaagacagaaataggccaagcagggagggcttcactaagaagggtatattggagctggatcttgaggcatgagtaacagctcaccagatcaacagagaggggagggcatctagacagggagaaaggcaggtgcaaaagtagggacacatgctttatggtttgtgtctggctgatgtctgtgcctctgcatgggctgtgagctgagggcactgggagcctgggaagggtttccagctgggagggacccagccagctttgtgctgctgacgggcattctgggttagactggaggggacaagcttgagggcagagagcatgcatagcatgtggagctggggcatgaggtgggcttgactggaggaccaaggagggcacaaatggtcaggatgtgcctcaggtcagctggagagaagcagtcaagacaatgggcttgatgtggaaatgcctgagctgcagaacaaggcttcttcaaactcccaactaacgttggggcctccccacctaggcagagatagactggcaggcaagcttgggggctggggggtcagagagctgagaaggtcaaccagggcatcacccacacaactcacagggatcaggaggaacattctgtcaaccagaaccagggcaggaaagctgacaagactagagaagtttcctcccaccagacagccaaagggaaacacatttgttttcaggagacaacgtgattgttttttgcactgaaaaggcaggaatagaaaattccactttccaagacagtcatctcctcccccaagcattaaagggagcttctgtatccagcttattggtgcttgaaattctaccactggagctccatttctatggcttgaggctttgccatttgttaaaatgcaaacaacttcaaagaagtcatgtcttcaacagaaacttattttcattaattcaacaaatattgagttctttctttaaaccaggcagtacccagagtctgagaacagagaaattaattaagtcctatccagagccaaaccttcaaggaactggcaagctctgcgccgatagcaggtagaaagtaggggcagggatgccataaggaaagctgaccataatggtgttggaaatgatggtgggagcgaggtgctgtgggaatccccggcagagattattcatttcaaaattgcaaaaggtgaagcttgacctgggatctaaaagataaggagggtagagattaggggctgagaatcccggatggagggcacagcaagggcaaatgaatggagtcatgagccagtatggatgagggggactccattccactaagcagagggcttggccataaggcaggacacgaagacagggctggagcagcggggggagttctgattgactggatcatattaatgatctcaggcaatggcgatggcgactatctcagggctttgtttgcctccccagcctccatgtcagcacttcccaccaaatcgacagaccctccctcagggaactaccctgtcctctcaacacgtgccctgaacgacccaccctcagctccagggccgggttctgattggcctaagccgtggggctagcctatcttgctggataaagtgattggttcaggaaatggcacatgacccagttcagaccaatgaaaggcgaggagatgttcgctggggtttctgggaaagaggagttgtccctctcttcagagggacgtcccggaagcgactggctctttttttctggtcgctgcagagtgagggtgtgacgggccagcaaggacagcaacagtcgaggagaaaggagagaatgccagagagatggagcccaaacctgaacccaggatcaaagggcaactgagtagcactcgctctggagttctcggtckgctgcgccgctgacttgccaaatttgcctaagcccgtttgttggtgtttgcaggtcctaactgatgcggtgccatttttcaagtacagaattggataagcgttggagacagggagcagccagcaggtgcaagcacttctgtggatccagtccctttccttctgattctgtctccgtgtacacttcgtatcacaaatcagggtcttgccctggaaaacatctcccgacccctcttgctggcctggcacctgcacagtaagtcctggtcgggcagcccgagtgtcaggaaccctgggctctgtcccaaccctgtctgctgtctggctgtgggacctgggctgatttatgcccactctctgggctaaatttgtgattcatccaccagcccatagactgtgaactccccgaggaaaagggcgatgtccaacccatccatgtggcccccaagcccaggacaggcctggcatacagcaggtgtccatggagctgttgaccagtgtgggagtggcaccttcctgctctaacctcccaggatcagggccattcatgatgctgacagggacagctgcaattccttctgtccaccccaacagcctcctggaggccccagcccgatgctagagcagcaggaaatctcaccggaagagatttcacacggaggctttgaggcagaggcctcagttcgcacacagcctctatctctgttgaaggttcactgagccacaattagactatagggtgaggaaaatcccccaaagcctcraccctttctttactctccagctgcagctgtcctgggcaagatttgaaactccttakttcattggtgtctgtggcaggggtgagggaggaagagcaatgatgaggagcccatgttataagacaagaatcaaaaagagaaacaaggctgggcacggtggctcacgcctgtagtcccagcactttgggaggccgaggcgggtggatcacttgaggtcaggagtttgagaccagcctggccaacatggcaaaaccctgtctctattaaaaatacaaaaattagtcagacatggtggtgcgcacttgtagtcccagctactctggaggctaaggcaggcgaatcacttgaacctaggaggcaaaagttgcagtgagccgagatcatgccactgcactccagcctggaagacagagggagaccctgtcaaaaaaaagaaagaaagagagagagagaagaaggaaggaaggaaggagaaagagagaggaaggaaggaaggggagagagagagaaaaggaaaaagaaaaaagagagaaagaaaggagagaaaaaaaggaaggaaggaaggagagagaaagaaaaaagagaaagagagaagaaaaagaaaagaaatgggccgggcaaggtggctcatgcctgtaatcccagcactttgggaggccaaggcaggcggatcatgaggtcaggggttcragaccagcctggccaacatggtgaaactacatctctactaaaaatacaaaaattagctagaygtggtggcaggtgcctgtaatcccagctactcaggaggctgaggcaggagaatcgtttgaacctgggaggcagaggttgcagtgagccgagattgcgccattgtactacagcctgggtgacagggcgagactctatctcaaaaaaagaaaagaaacaaatccatggtgttcggctaatgtttattccttaacaacagcagaaccactcctctgccstattgggtggcgtgggctgaacctcagattgttcagaggatgaggacctgtgtgtctgtattcataggcaggagcagagaaggcaggggtggaaagacccactttctcccatggggagagggttcagtctaaagagaactggaggtgggtcaggggctcaaagcgaccctgttgttatgtgtagggagtttgggaggggagagtaaatcttgtgtgacatgtgagggtgggcagggatgaaaatagrggaggaaaatgaggaagtggtggatgatgattgggaaaagttaggagccagaacataaaatgttgaattccaagttaaggatcttggccttcactccatgggcagtgtacctcacaccacacaccccagaagaattttggcagtgtgcccagagatacatgaagccataagatgggtataggacatcctccctctgtgtggaaaatgcccattattttatattttatattaaaacaatcatggatatatcacagagggcaaaatatgcatggctttgaaatattagattggagaatttaaagaacctatgagcctgtggctggagtagacgaagccctgtctggatgcagacctctcagtaacctgggtgtccccatgtcctaatgctattagcaggaagctcccagtttctctttcccaaacttatcaaaatggaacctcagcctcctccattactgggagggaagaaattgggggcggggatagggggctgtccatgatgctaaaactggattaacccatttccacagatgagctctgaccttaaagtttctattctgtcttcaccttctggaagctagatgaaggagggtggctcggggagacccsaggaagctgagtactccaagggctagggaagtaataatcctcagggcaagggagggctggatagtagaggacctagaggaacaagattaggacaattatcatgtgtagcatttacaggtcctaggaaaaatattttcttgagtttggagactatctctgcttcctaagaaccattcartgttctggaagtgagccctgaaaatggtcccttaggaaaatagttgctaggtcctcctctttgtgtgtgtgggtgtgtatctgtgtgtgtagttgcttctgtatgcatgtgtatggcttactatgcatgtaatagactctgtgtgtgataatgcatagctcatattaaaacaactggcatctcataattcaattcctcagaaggaaaaatctaggacaaatatttagctggtattttatcccaattcaaaaatgtgtacatcctgagttgtctcatctccacccacagccctgtagtcacaaccacccaggtagcatctgctaagaagagaaagctccagtctccaagtgcagggatgggggtgcctatcttggtgggggctgaggggaaagcctgcaaggatttcacagttccagggagatggaaagcctgcagctcagcacagccaacctgggcttgcagacatggtctcyagccaaacttcttgtctggcccatcatgactaaagggaaggggcccgcaccccaagtgtctatacccatccgtctagggctgctctgttccccagtctygctgggccttacaggcctgggagcatccagccttcagacatggtgttagccaattcagagctttggctgcagacagaggtgggttggagtccaagctccactactcacccattgcgggactgagggcgtgttgtttcagctgctgcacctcatttgctgtggaccccagtgcgtgccccagtgtggctgccmcacagtcagtgatccctcactgtggatcgccctctctgtctccctaacaggagacatgacagtcatttgttcatgggttctccatgtacatttcttcctgagtgatctattgacatgaaattggccttcagctttttttttttttttttttttttgagacagagtctcgctctatccctcaggctggagtccaatggtgtgatctcggttcactgcaacctctgcttcccaggttcaagtgattctcctgcctcagcctcctgagtagctggaattacaggtgcccaccaccacgcctggctaatttttgtatttttagtagagatggggtttcaccatgttggccaggctggtcttgaactcctgatctcaggtgatccacccacctcggcctcccaaagtgctgggattacaggtgtgagccactgcacccggcctcagcttcttatatatttatcagtttagccaccgttaatacataaactgttgtcctcacagtaaaatttgttaactgcattcctttgcatgtgtgatttgggcttctgtgcctcttcagacttctctcaacttggacaaatccatctgctcctctgcatgaacaagccgtcttaccttccagtgggatgggttttccagactctcccagaacacacacatttgtagatttacagctccttttcccacttctgctgccactctagctactgcatattgaggacttgctcctggccaggcatagtactgaatgctttgccaagattatctctaagaaatgggcaccgttcttatccccattttacagatgtgaaaactgaagtttagaacagttgaatgattagcccaaagtcccccaaatactgagcggtggagccagcctttgattttagatttttctgattctagagcccacaatttctgcttgcattttgtaccatagaatggaaacagtcctcctccaaatgttccactgtctccttctgtctttcttttcctcctcatcctctcccacctcctccttttcttctcaccctcctcttcttcctccccatttctctgtaagcctcttctttctctctttcccttccccagatatttgcccccaacccagcactgccaaacctttgtagccaggatgtttaagagctgagattccatgtcacctgctgggacagaaaggggaatatggcttcagagacacccctacattatgggaggaaggatggccaaggcctccagacttacaacccaccctgaggcccctcccctagctcagagctgtgtgcctgggaaaagacacgttggtttctccttcacttctagcagctcaaggaaggaccatccctgtcctcagcatcccatcactgcaggtgtgtgggtgacgataacactgttcccaggtttactttcacacagtgtgccaaggagtttctcctggacctcacgtgatcctcacatcatcctgggaagtggagcattatgccccttgaatggggaaactcaggtcacacaggaaggtaggggcagaaccagcatcagatcccagagtctctcattcccagatcagcatctgtaacaaaagggcaggcccaacctgtgagttggtcacgatgtcggttgttttagtttttatttcagcacgagtctcacctgccagctcctcagagccgtgggagagggtggggccagagctgtctggattcagctcagggccccaggtctgccactggctcagtgtgtgtgaccttgggcaagcgctcctttgcctcagtttgccacaggcctgttttctcatctgtaaaatggtcctttatgggaccagggtgctgagtttsactcccyggcgatctgtgctaggagcatcctgttccccwggggcttcggggctggacgtagcctgtacagccgcttggctccacagcagctgtttcacttcctcagcraggattgtaattcctcctgctggaaactgggtccatgcgtttggcttgaatacgttgatttgtcaaaattaccatttcctggggctgctcacatcagaagcagcaggtggttcttccgtgtgcttcagaaagcaccccagagtccagctgggacaaatccatccctccaaagcgacatctgctggaaggcagcactgaattatgtcgcattataacagcatttcactgggttcctgtgacctttatttagccagagccggaatctcctaccgaggggcccgctcccctgtctggggacttttcctggcctgcaccaggcagactgcatcatagcaggtaggacgggggtcagggtgaggggttctgggccaggcaggggtgggcagagataggcccccttggcggagaggagaaggcggggttgagaggaccacatccatgggacagttctctccgcggggctggtcacccaccatgggtggccctggagactcctatccccttcatccattccttttctcactcactcagtaaacatttcttggccactgatgtgccagggtgacatgccaggttaaggggacacagaggtagggaagagcttgcttttatctcagggactcacagtctggaacaagagacagaaactctgtgtcaagaaacaataacaggcatcagggaacaggaggagggagcagttaactccctccagggttagggggacaggggtgtgtctcagggtggctgccccaaagggtgctctttttgaagcacatggatgaaccacctgttgcttccaatgtgagcaaccccaggaaatggtcatttcaacagcttgccctgagtcaagggccccagtgctgatagtttatctgagaggggawccctctcagataaagtgtggaaatggaacgactaagtggggaaaagagaaaagtcagtgaagcatgaactaagcactaggcagtgggttacagcgacggcagcttcggggctcagtcctgctggggagcctctgaggcctgcgtggaagatgcccccagagcccactctcatgactcaaggggtagtgggcactgttcaccacctctcgaggcattaactcctcctgtcccctgtactcctagctgacacctgccacacagacaagcaagttctccaggtgccagagagagaaagagatrcaggcatttgaggtgggaagctgtcagcatgctcagaactgtctgtaactgcagaactcagagtgccaaggggagggggacaccaaccacatctgttacagcatcttaggaaagctgacatctgagctgggtttgaaggtgagtaggaggtttgcagctggagcaagcagggtgagtggctcatctgggcagtacaaacagtatgtggatgggaggggaagaaatgaaagtggctcgaggggccagaagatttcaagaaaggaatttattttaaaattaagtatgggggagattgagcaggctttatgcagggaagtcaggggtgctgacaaatgccgggggaagtggggacagagagagagaacgctatagggacaatgtcccgcaaaggcagaaaggaatcagtccggaaggtggaaacggactggccctcaaccagaggagagagtctgtcctgagatagttaagagtcctcttcccaagcgggctgagaacaggttcaggagagaagggagtatttgagaaagtcaggtcactactgggagtgaaaaagctgatggtgggactaggggagaacttaagaaaggtggaggatctgaatagtccttgaagggaagggcggttggagcagatgacagggaggtggcagaaacgatgggtgatgctggagcccgctgacgttggcaatcaccccttggcgatgttgccagtactcactaagtgcagttttctcagcagcttctcagcagctcagaacaggagttgagaaagcagatggctgccttggcaagtggctggggattggtaaggcagggaggcgagaggagaatgtcagccacctgcaggcacagaattcctcggggaaggtttcactggctttccattgccttcctacccytggacctgggagaagaatggggaagggttgaaaagaccagggctaggggtttcagtgcctaggctctcatccaagctctgctgctcactttctgtgtgaccctgggcaagccacctccccttgtaagacccctctttctatacctattaattcaggacttctcatcctcagcactactgacattgcaggccagataatttcttgttgaggggccaaggcgggggctgtcccatgtattgtaggatatttagcagcatcgctggcctctacccactagatgtcagtagcaaaaccacattgtgataaccaaatggtccctgggaagcaaaattgcccccagttaagaagcactgtattaatcagaataacgataatacaactggaataataatgtaagtggaataataatgacaagatctatccagccaagccgtaagaagaagggttgtcatgaggatcacagaacatcatggaaattgaggtgaggagaaagcctttgcaggtcattagagcagcttggatggaagtaggcatctgacacaacttctcctcactttccccrcctgtaaaggacataggttagaagctgagctgggcctagaacccaggcatcctgattcccagctctaggctttggcctttctgcaaggcatgctgggaagatgccacatcctcatcttcaccatgttcacacagaaactgggactttccaagacggatctgaaggaggcagaggtgaagagaaaggccaagaggagagcaagggggaggccaaatcttcatctcaaatctgattaagatggagacagcaaggaggccagatgccagggtggagagtatgtgaatagagaccattcagaagacagagaccacaccagtaacctaaacatggaaaatgtaatgtaaagaactgttcatgaggctgggcgcggtggctcacacctgtaatcccagcactttgggaggccgaggtgggtggatcacctgaggtcaggagctcaagaccagcctgaccaatatggtgaaaccccatctctactaaaaataccaaacttagctgggcatggtggtgtgtgcctgtggtcccagctactggggaggctgagacaggagaattgcttgaacctgagaggcagaggttacagtaagccaagatcacgccactgcactccagcctgggcaacagagagagactccatctcaaaaaacaaaacaaaacaaaaaaaaaaaaamcaaagaaatgccatccatctctatagcctttcaatacccctccactgccctctattgacagagattaacattgcaccagcctgcaaacaaatgtttatagggtccagctccagtaacacaaagcaggacacagaagggtggacttgagaaacaattggtggaaccatcacagtccttgcctttgacgaatcagcttccatatatatctactacacacttttaaacttcccttcacaacaaggcaactctgtgtttccacctaaggagatgcagttatcccttgtacacataaggaagttcccacccttgcctcaaaataaggagacacgtagttccaacatcattcaccccttgctggctatatgaacaactcctcaaaatcagcacagtcacactgaatattctgtttcctaaaggccatatggtaaagttaacctccaataactggtatataaataacaatggggagaacacatgaacacaaagaagggaacaacagacacccaggcctgcttgagggtggaggctgggaggagggtaaggatcaaaaaactacctattgggtaccatgcttattacctgggtgacaaaataatctgtataccaaatccctgcgacgcataatttacccatgtaacaaacctgcacatgtaacccctgaacctgaaataatagttggaaagaaaaataggccaggcacagtgtctcacacctgtaatcccagcactttgggaggccaaggcgggtggatcacgaggtcaggagatcgagaccatcctggctaacacagtgaaaccccgtctctactaaaaatacaaaaaattagcccggcgtggtggcacactcctgtagtcccagctacttgggaggctgaggcaggagaatcacttgaacccaggaggcggaggttgcagtgagcctagatcgcgccactgcactccagcctgggygacagagcaagactctgtctcaaaaaaaaaaaaaaagaaaaagaataataccaacgggaagaaggagaaggaaacaattaacatagtcataaatatatacacataacaataaatgagaaaatatgcaaagctactctagtcctcatttctgtaactgaccacaaggccataatttatatctatgatttccttcttccactacccattccgaatcttccctaccctcaaccagaacctcagctagttggggttttttttttaccaggaagagaaagtcaaaacttcattcttgaatgataggagccctcaattatcctgccttttttggattgatgaagttctccattaacctgtacagttgggcttggaagtactaagaggcacacccgcagaatccccttagttccagacatagccctcctgtccccatcgtgtagaagcaatccaatttttccgtggaaaccaggatcaatcattccatccaaaagagtaacccttttatcggcctgtttgataggtgacgtaagaaccccaaatggctagaggcagtctcatccttccattcattggaaccaacgttgtgtcctctaggattccccccatccttgccttaggaacaaagatatccaagccagcagagttcaaatttgcaaagacaagaagcaaacattctccaagtgggtgattaagaataataatgagaggagcctgtaccagttgccatttattgcttctgagttccaaatccacccctcatggcctgcttgtgaaactagaacgttttctcttgcaagttggcatggtgttgattttgtcaatagatggcactggcaggatgttggacactctgattccagagtacttggcttcttcttgcattcggtggtgtgcaggacactcagtagagcacaccgctggtgatagcagcagccctcccatatctggcttctcaaaggcaggatctatagaagccccagctcacttccactcatcttcccaaaaatggcttcctatcctcccaccccaaatactctgagaaacttcttggcagccagtgctccagctggcttcccagcaagttcaacagaaaccctcacaggcagcttctgaatttcatcagcatctcagcaggcatgcccactaaccttagcccactgtggggaaaagcaagagagatcagattgttactgtgtctgtgtagaaagaagtaggcataggagactccattttgttctgtactaagacaaattcttctgccttgagattctgttaatctatgaccttacccccaaccccgtgctctctgaaacatgtgctgtgtcaaactcagggttaaatggattaagggytgtgcaagatgtgctttgttaaacagatgcttgaaggcagcatgccccttaagagtcatcaccactccctaatctcaagtacccagggacacaaaaactgcggaaggccgcagggaactctgcctaggaaagccaggtattgtccaaggtttctccccatgtgatagtctgaaatatggcctcgtgggaagggaaagacctgaccatcccccagcccgacacccgtaaagggtctgtgctgaggaggattagtataagaggaaggcatgcctcttgcagttgagacaagaggaaggcatctctctcctgcccgtccctgggcaatggaatgtctcggtataaaacccgattgtacgttccatctactgagatagggaaaaaccgccttagggctggaggtgggacaggcgggcagcaatactgctttgtaaagcattgagatgtttatgtgtatgcatatctaaaagcacagcacttgattctttaccttgtctatgacgcaaagacctttgttcacgtgtttgcctgctgaccctctccccactattgtcttgtgaccctgacacatccccctctcggagaaacaccsacgaatgaataaatactaagggaactcagaggctggcgggatcctccatatgctgaacgctggttccccgggtccccttatttctttctctatactttgtctctgtttctttttcttttccaagtctctcgtcccacctaacgagaaacacccacaggtgtggaggggcaacccaccccttcagcccaccatgagaccatctctgggctgacaatccagtgaaattttctaccatccaataggctgcaactacaccctcctcaagggtctgaatcccagctgtggagaggatcctctcttccttctaagttttgggccttgtacattctccttcactttagtggtattctttagagttctcttttattcccccttagttaatctcatatgttttctgtatcttgattgaaaattgactgacatagaaccactcccacttccacccctgattaatggacccaggtattctaacaacaaggaaggtagcactatacaatggtgcctgattcaaagcatatattgcatcctttcagggaatgtctcccaagtggtgccatacctgagccttcagtaagccattccatcttttaattagaccgttcacttccaggtgatgagtgatgtggtaagaccagttaattccatgggaatcagcccacttttacatttcctttgttgtgaaatgaattccttgggaagaggcaattctgtgtactataccatgatagtgggtgagacattctatgagtacatagatggtggcagggacaaaagaatcacaggcagggacatcaaatatatctccagataatgattctatttcaataaggaagaatctatgccccctacatgatgggagatgtacaatgaaatcaagatgaaacctggtagatgaccagtctatccagggaatggtggcatactgtgggctcatgttggtctcttccgtcagaagattgagcacccagcagtggcagtatccaaagaagtccttaggaaagggatgttcatgtttttaagcccaggcatatcttccatccctgccactacagccactttactcatgggcccattggacaagcatagggacagaggaataaagaggttaactgatcatcacaaagcatgttatattgctcacctacttattgaaagcctcctctgcagtggatgccctttagcaaacattcacatgggacacaaatcttcacagtctatgcccattctgagaagcccatccacatgactcttctgcagaattccccctcttccatcttccagtcctgtttcttccaagtctctgaccaaccagccaaaccataccattaacaactgctcataaatcagtgtagagccatactctggctatctcttattccagaatggacaaccaaatatactgcttataagattttccctcaccactgtatttcaaggtcaccctaatggggctgtgatacctcagtcttctgttttggttggtatatcggacagcaccatctgtaaaccaggcttgagttttcattgttcagcaactggtcataaggagctccccacgaggccataggcatgatttgagggggacaaggcaatgcggcagaagttgatgagaaaggagtttgaactactaattcatacaacttactcataccttccaggcttgcccaagtgaggtctctttaatagcattctcatttgatgatagattgctgccacacaaagctaaccttataactagttgcgtcaatagaatctcaattaggaatcttaggctgcatggtcacttgatgtcccagttaggcacccagtctctaccacagtccaatagcaagctagaagctatttctcaggggggaaaaaagtagtgtctgaataaacaggaatagatttactttagaatcctaaaagtttgcattgtgattcccctttaggggcttagctgtgactccatacagcatccctacctgctgtggacaatttgagaatcactggatctactggatcatycaagtggtagagaaactttttctgaagccttaatttgctgcagaacctccttgactcaagactggaagccttatggagatttttgctcatgagtcaaagttacacacgcaaatgtgacatatgttgcctctaaaatccaaaatgcttaccaagtgctgtgcctcttttttagcagtatgtaatgtgcagcaacttgactttcaccttggagagacatatcaacatgttccagaccactgaacctcagaaactaccgagacagcagacctctgaaattttgtgggatttatttaccaccctgacattcacatatgttgtacttgctactgcctgttcatcaggcataatcagctcatcatcaatgtagtacaccagtgcaatgctttgtagaatgtcaaaatgatcatattatctgtagactatataataggagaaagcaagagaaattgacttggttctgaggcaagactgtgaatgtgtactgttggcccttccaggtaaaagcaaactgtttttgatagtcctcactaattggtacagagaaaaatgcagtagatgggtgaacagctgcataccaaagtggtatactgagttgctccagtaaagatgctctatctggggcagcagctgcaattggtgttaccacctaatgaaatatacaataatatagtcattctccaaaacccttccaacctctgcataggtcaaataggcaagttaaatggggatgggataggaatcaccacccctgcatatttcaaggcttcatgaatctctgaaatttccccgcggatatggaagtgcttccaatttgctatcatggcaaagagaggaagttccagaaacttctatttaggccctttcttccatgatggatctcattccataagacaaagacccaaaatggggtctcttcccagtgagagtatgccaatttcacttatacattcagaaactgggggaatgtccaactgaacacatttgggctaaatatctatcacctgatgatctaagtcaagactttgaatggtggaccacagtggcattttgcaaccccaggaattatcataaattcagagtcaatgtctagtaatcccccaaaggactgggtactttctttccccaaatgcagtcattctagtaagtggccacaggtccccttggagaaggcttggaggaagtttgkttttttttaattatttttatttcaaatgttttgggggcacaagtcgtttttggttacatggataaattccttagtggtgatttctgagattttagtgcacccatcacccaagtagtgtacacacacccaatatgtagtcttttgtccctcgcaccccccaaaccttccccactgagtccccaaagtccattatatcattcttacacctttgtatcctcatagcttagctcccacttataagtgagaacatacaatatttggttttccattcctgagttacttcacttagaataaggcaggcatggaggaagacttatggtatatacttatagcactactgcaagaatcttcttcaaagggtctggcatcctcctaaatcaagatggtctgatctgtgaattgctttaggtctagaaactggatgagaagccgtaactgcaacagtcattccagtcgggttttgggcaccagtgctagagttgtgtttgttcatttgtttttctgtgatacagatcaagcagtgctttagtaggctatctgtctatttcctttctagggacaaagtggtcaattagtcaccaccaaagatccctatgggccaaggcattctaattacaggcacatccctgctgccctttatggcgcatcatccatattgtctttggttattaagcaattccacttagcctctgcagctccaggatgctatcgtccccatgaaatcaagaagttcacaggaatgatagcataatctatggtaataactggactatgaaggtgaacatccacagagtttcttaaggatgaaggttctcctctcaataatatatttctcagtgccttagttaagaaggtgtcttccgagaattttcatggaacatagtttgcaggggtggttgtgcaggtcacacatgataaattcactccaacatcctatctccttaagcctttggactccctcttccacattatgccatggaacctctggcatttcaatttcattaaatgtaagccaccttcaagtccaagtttcagtcaaccaactgagtaaactgttagagcgaacttcagttgcacaacttaacacattaaataccaaatccacatccatgaattcagaattattaccttccacccttagaatcagctcccataaatattccctgaattatgtaaaatcttgccattagcaaaatcttgcctttcttctgttgtgttgcctcgttctgcatcacagtgagtacctgtccccttggagcatgctgagatttgacccttgttatggatctagtggtaacaaagsgtgcttgtggcatctcctgaggataatggtcatgctatctcaaggcatctgccccatatgaggttatctccgcattttcaaacaaaggaaaactaacctcctcagatacaagaggggaagatatttccattggcaagggaggctcagagggcctcagggaatcaggattctccattttatctgagtccaaccagatgtccctattccaagtttcaagatcacattcttccctgatttatacccaaactttcacatgaaaaacttgtgatgctataaatttaactgacatttaaattctgccacccacacaattaaattttgtgtttggttttgagcaatatcagccctgtggctacatgaaatatgagattcttttacggatgacatggaagctctgtggtcctcaaactatgatttgagctgagaattaaataacctcaacttgtcttttcttttctagtaagtgctccagtgcatgcaagattcatcccacaccacagtccttgcgggcatcattactggtgtaatcatggtcaggtgcaggagtcacctgagttcccaagacacttgctccagttggcattgcaccaaaatccattacaggtgatagcaacattatggtgccattatgctgtagattacaagcatcccattcccactggcaaggaactcagcattgtgctccagcccaaaggcacaatgaaacctatcaaaatctcatctttgcgggtctgtcacctgggaccattcctgctctcaattccttatcaattaggatccagtcaggagacagagctcacacccataatctgaacgtggaaattttaatataaagaattattatctaacaaaggatagttaattactaaaaagggtaaaagaacactctatgagacccagaagcagcacgtgcaaaaaagtagctactgtttctaggctgagggaaagtgaataatgaaggaaatagggcctcaggagaaggtgttccccctgactcagacctcctctatgagtgagtgatgaccatgagaacatgcagcctccagtggctaagaaacctgccagggaaagtaagctggctcagtctgtggacatggccgtctttgtgggaacctgatcccacatgggttcaggctggtgtcaagtgtgagtagggctggtctatagaatcgatgtccaggtggagagagtgaagcctgatggttctttcctgttatacagaaaagacgtttggagctggtccacacaggccactgagatgatagcactgggccttggctcctgtgctggaaacaaaaagatggaaggaggaccagaacctggaagggaagtgccttcccgctgcagagggaccttacagtgtccctctagcgccctctcctgacaaagcctaacattgctctagctggcacaagagaactgttcacagggtccagctccagtattacaaagcagggcaacgaaggatgtatttggagctcagagacaataaattaagaactgtcatgggcgagagaggcagacatggaagggagcaaagggttgattggggaagaggctagaaggggaagagttgctatgccttttgtagggaaaggagcatgcatgggctggagccctggggagcaatcccagccctcttcaaagagagaatgcagtcacagaataaacacagctcaagaaagccacattgttccactttcaaaagaatagaaaataaaattcctggacaggttccctcttcccacttctgggagtaagtagggagtgggttgagatacatttcrtttttcttcaaaaggctttctcagctcctgctgactcaggccacctccaccctctgcagattcaagacattcaattgtccagtcactggcttttgctgcaggcctactagatgcccagccctgagccctgtttgactgtgggcctcagctaagcctgtttgtggctgtggctgagcctagcttgagtgagtgttgaragggcagactggttcacggacaagagaaacttccagcagttaatgtggttcaggtttagatctgccagtatttctccaatgattataagagcaatggtttggagtcaagtgacatggcttttaattctgtcttggctcttttctagctgtgtagccttaagcaattcacctcagctctctgagcctctttcctcatatatcaaattgttttggtaacatctgtctctcaggatttctgggaagattagggacaatgtccacattaggtataatgcaaggacctgccaaagtaggyacagaggtccatcagaccaaagctcagactacacccaagatttcatcaggctcagaaagcagatgcttaggccagtggcctgggcactaatgagcaatgccagccccattgtctctgagggatgttgagcccattgctcttcaaacagggatgcattaagagattaaacacagcccaagacagccacattattcactttgaaatgagcagaaaatgacatttctggtcagggtccctcttcccatcccagggagagagtaggaggtgagcttagacgagtttcctttttcttgaaaggcgttctcagctcctgcgctcccgctgactcaggccaccctcacggtgagaatgcagcagactaggatgatcaggcagtgtttcaagccggccctggacctggagaggctgttgatggtgaggcacagtggagatgagcccagctagggcagggttgggagagcagcctggctgagggttgagagcagcctcaagcagctggtgtggtgcaggcatagactggctgttgtttgcatgagcaccggctttggagtcagtcccaagttctagtccagagactgaatcttttctagctgtgacattgagagctctgccctcatttctctgagcttcagctttcttgcctgctaaatgggcttggtgatacccacctctcaggatgctggggagattaggaacagtctgtattagggacaatgcacagcagtcactattgtgatcaccaggaccagccagggtgggggtgcaggcccatcagactaaagtcagtgtaaagccaccagcctcagacacccgatgcttaggccaatggcctggaccccactgagcaatgtcagccccattgtctgagggatgttgaacctgatgctgtcctacttagaatgagctcctagaaagcacctagctctgcctcctcatggacaaatcaggagactgagccccagatgtttgctcaatgccacacagcatggtggtagctgagccagcattggaacccagcctcatgacttcaagccatgtggtcatccaaggactaaaaattatgtgcttaagagtataggctttggagccagacagacctgagctccagtcccagctctgcaactttcattcattcaacaaatactcgttgagttcttgtcatgtgccaggcaccatgcccagtgcaacagacacaggaggacaagacctacatggccctggcctctcgctgctcagtctggtgagaagaaatacccagtgaatgaacaagctcatcacccactgtgagaaagcagcaaggcacagacacaggatgggccctgaaagacacagggacagtgggtgctggagggccactcagggcattcagggagggcatctcaggaaggggacatctgatctgggaactggacaccaggcaagagccaggtatgcaggaccggagaagggtgtccatgcaaagagctcagaatgatgggggaagaagagcctggagtgcgcaggagcgtgcaggagggacgtggacagacagggtagagccaggacaggtgggcctcagaggtcatggtcaggagcacagtgctcatgcacacagcagcaggaggcactggagggtttgagcaggtgagtgatgggatctggcctgttttttcaaacgatcacactggttgctgttgtttgtgtgaccttgttggctctctgacctggggcaagttgcttaagctctctaagcctcagtctcctcatctgtaaaatggcgatgatcatagtacctacctcacaggtggaactggagactgacatatgacagtctacagagagcactgagcaatgtgcatttcagtgccgaataaagctttgctttcttacatccccacgtccaaagccctcatcctctacctgctggccattcattgcctgacttgaacctgttgatcctgcctatgcaatgactccattatttctgcactgcccttagccatggggatgttgaggccaaagctcattaagctcctgtccatcagaggtcaccggggcagggggaggtccatggagcccagggagagagattggccaggccctgctcccaatgagggccttgcaagtggccttggcatccatcaatgtcacggctccatctcctgggtgcctgggatatataatgcatctcaatcaggggctgagagaggttgtgtgaagtaatcattgctttcgctgactcctacagccagatttattatggtataaagaaacaacttagcttctggcagtaacaggcagctggcctagctgcacttgtagaaatcttatttgctggggcctgggtgggtggaggtttctacccacacttgctcagccagaggccctggacagaacccggctggaccattcatcttcctgtgctcctggccaccttgtctgagaggccgccaccttgtctgagaggccgccacctctgacacatttcacagcatttgaaaagcagtgcttaggccacaaattccccatctggtattacaccgaggggatccttaggcttttgggccagggaggccacagagcagagcagttaaaggcccaggtgttggagtcagcctaaacatgggttcaagtccctgctctgccatatagtggccaggtgaccttgggtgagtaaactcacttccctgagcctccatgtcttgtctctaaaatggaggggtaggaatcccccctttaaagagctgctgtatggagtaaggaagagccaaagggtgtaggacacataacacaggaataggcactagatgaaaggtgatcgtcaccattttcattatccaggggcttcagtattatggcgtgagatgccctttattgagggtcaattatgtcaccagggagtatgctggttccttttaaatattttgtccctagacctcacaaccaatcctgcaggtaggtcctgttatgtttattgcagggttgttaggggattgtgcaaggtcacccgactgtgggttgtggagctgggggcgggactatgggttctggagctggtgctcctcctaatacagagcccacctccccagcttctctgagaggccacacaaggcccctggtcagtcgggcaggcaagtccaacctctccttccttccctccctcgtgccaacatttccagggcactagctccatgacaagccccttactgggcaatggacacaagatggcacagaaatactccctgcccttgaggagccagcaccgaacagagcaaagggccgagccgcatccagactgctccgcacgcgtgtgtatcagttagcaaaaactaactgtgtatgtaacaagtgatttcaacagactgtcttcaaaaaaaaaaaccatttatcatctctcccagttctaggggttggttgggcagtgtcttctaagcttagccatgtggctacacttacctgacaggtcagctagactggaaggttcaagacagcctcactcacagcctgggagttgctactgactgttcatggcacgcgctggttctcctctgtgtgccctcaaatcatccggtaggtgagacagcttcccttgtatagcagagttccagaagagcaaaagcaaaaactgcaaggcctcatgagacctgggatccagaactcacacgccatcacttctgcccatgctattggccaaagcaagtcatattctatcgcttggccagtacccgtgacacacatttgtgatgcatcgcgtaaggctcagaggtcagctcagaatgaggatgagggggtcagtctgtgccctatccaagtgtgatcctaactggccagttaatttttaactcagattaaagtatgctgaattgtgaggtcattagaatgggttgtatcctctgaccactggagaaactgaggcacagagggtcagccagtgtgcaaacagaatgagtacatcatagagtcagccttcatatgaagaaactgagttccagaaacaggaattgtcttgtccaaggtcaggcagcaagcctgtgacagagtcaggagtgacccaggtccctaccagccagcctgctcctcctccctctctaccccatggaggcggctggggctgggaatgggctgggctggggcaatgggacggtcatccccagcagggctgtgtctcctctgcccccatctctgcgatgtttgtaaagtaagccctttcaacacgcttggcactacataaggcacttaatcattacctcatctgatccaaacaggactgtccccactttacagatgataaagtaggccccagagagggcactaacttgcccagggtctcgcagctgctgggcccatctgcctgacaccaaagcctgagcctcccatgctgccccagaaagagctgaacctgatccagggcccccagtggagtgagaggcagctctgtggccctcagggatctcgagttgatataccctacctgaggaactgcttcagaggcctggatggggacagcaatggccagggtcccttggaaccaactctgaaagtggaaggaccctgagtgatgtcctggtccacactcccaccattttacgaatggaaaaaccaggaccagatcagaacccaggcttctccagggccctcccactgcactggaggctgggggcaggtgagcaggccccgtcaggctggtgagacacacacagggctgctctgtggcattcagagagcacgtttatttacaaagcgctttacaaacatcagcttatgcctccccacagccccctgcgaggtaggtcagtagtcatatctacagtttacagatggggaaattgaggcacggaatgggggtgtggcctgccccattttaaagagaccttcccacccacccaaccaaaaataacaaaagaaacaaaaaagcactggtcctacctcttcctctgaactccagagggtatgaccagccctgctctaacactgcccctccccacaacgggcagcctgaccaggagccacaggggcctcaaccccaggggctgttgttcagccttgcagattgtcactggcccaagctgagcaggacaggccagtgaggcctgaagattaaaggaagaggggggcgaggtgacttcattctgcaacagtgggtcaggcagggaaggagccccccatggggcacagcagtaataggcagatcctggttcagggaagctcagagcacatatcagggaagcaagtggggagggatagtgagcaaaatatctcaggggctgcagggggcagtggggaggagggcgctgcagttcccctggggaggacagtcagtgtgccccactggctattcagaattgagacctgcttccccaggaccttcaggggctgggccagatggaatcctaaatgccaagtcccagtacatcctctacccacatgcagagggggcaggctgagtgggaaccttggcctgggatgctctctgcagggcctcactcatccctgccaaaagccaggatggtgccaaggggcttggcctgagtcccccagagccagccgtcctgagcctttgtcactctgccaggcagcaccaggcctctcagcacaggcctgcaggaccctatggaggtggggctgggctgcagacttgctaagctcctccttggcccaccacccgcccatgggacaagcgaaaggccctgcccacagtggaagggggagcaagatagcccagcatccactccagtgcttgccccatgggagtgtgtttgggcagagcaggaggcactgatcttcctcgccagtccaggatggtgggtctggccctgagtgtgcagtgggtgccccaggccagggccccgctatcttgactccagcccctccaagtactccagggccacatcgtagcaaaagtggtactgatcctggggagaggaagagagggagggaatcatgagcctgaccccaactccagtattgtggggggaggggaacggggagtgagagggcaagcacgagcccgagcccaggcccgccctcggggagaagggagaaatgggggtaatgttttaggaccacagggctagaaccaaggcccagtggtggggcccagatatgggagagtgggtgctaaggaacctggcctggcatggaccaggaaggtggaagtggctgggcacgggacacagcccctcaccatggtctccaccatgttgggtttgtagttccggagggttttggcagcaaagaaaacgtccaccaagttgtggcagcggatcatctccaggaccgtggcgcaggcgcagaaggtgccgctgcgtcctcccccgtttctgaatgagagatgcaaaagctgaggggcggggccttggaacctgaaggtaagaaaagggccagggaaccacgagggaggggcagagagcctagaggagagggacggagctagggaatctagaagggtggggcagagagcccagaggtgaggggcggagttagagaacacagaaaggaggggcccgagagcctagaggagaggggcggagctagggaacccagaaggaagaggccaaagagcccagagatgaggggcagagctaggaaacccagaaaggaggggccaaagagtccagaggtgaggggcggggctaggaaactaaggagggccaaagagcccaaggtgaggggcagaactagggaactcagaagggcggggcagaggacccagaggtaaggggcggggctagggaacccagagggaggagcaggaccaggttaagaaggatcagaggctaagacatctcagaagacatattctcaaggcgaaacagactgcggattctgagagaaaggaggccagacacactccaagagaaacacccggagagacaaagacagtgacaaagaagggcggaggagcagcaagcgcgtacccagagagcaaggtggaacaggaatgctgagaagactggtcaccacctggcatcgtgggcacacaggcacaaacgtacccaaaccccaagtcaaacccacagcctcccacagagctccatcccctccgtgcctctccctccttccctgtgactccacgtgtggggtgcctcctggggaatggcagactgatgcggccctcactccccttctcaggggtctttcccaccagaaccaaaacccctgggggccagacccggactgactcagctccgcaccagcttccagtaggcccagcctgccactcgaaaggctcagtaaatgctgaaagcatgaaaaagtggggagcaaaggagtgactgcacccagacatgagtgaatacatgaacttatgaatggggcatgcagatggatggatggatggatgggtggatggatggatggatggaaaaagtcacatgtgtgcatgcatgaacaaagactggaattctattggcataaaagtgtgccacaatctcatggggtaaaaaattctgaccaaggactctaattaaattggcaaagtcagacatcacacagaggatactgggcagttgttcagggctgagtctatagcctggaaactcactggattcctccagggccagccttggctggttgggcagcatcctggccacagccatctaagagcccaggggtttcggtgccagctttgcagtccagccaaagctggcaccctttcagactggacctctgcccctggctccccaacccctccacccgccctcccacagggcaggtactcacaggcagtgcacgatggtgcgcccatccccactctcggcctgccacttgtccacctcagccagcaggtgcaagaaggccttcttggagtcaggtgtgtcccggtatgcagaccagcgcaggaactggaagtgccgcaccagcaggtgcccctcctgcaactggggacagg

SEQ ID NO: 97366 - DNA, 14644 bp, Homo sapiens
tgtcattagccaagttcaaattcttcttgcttttaaaaaaatctttttttttttcagtttgcagaagtacatattatggccaaaaaaaaaagagacaatatgaaatataaaaagagaaaatccctttaatccctcccacctcagaaagaatcactttaaatggtttgatttattttcttagggcctatatattttctcacatacataatttttattataggtttattacatttactgctcttttacatgaatggtatatcataaatacggcttaaaatttgtttgttattttcatttaacagatatcttgaacaaacttccatggtatatattatagctagaataacctcattctggaataatctatagtgtgaatgtaccataatttgcccaatcaagcagaactataatgtttggcatctgaatcagttgcaaagattgtaggttaattgcagttataaaaatagagcttggaaattgcaactgccccaagttcttcacggctcttatgcaaggctgtgtcctaaagccatagggaagtttagctttcagttgcctgtaacattaaggttgtttcatgattttttgaaggtttgtttcacaccatttccccccttaaatcatttaactgaatggtatgtaacaggtgtagtttctaatgagttcttttcttcccctgtggctttagcatggcacattacacttctgtggatttaaagtccttgcccctcagatcagctttgctcctgaaattgcatccgaagaagaaagaaaggggatggtggctgcgtggtcccagaggctgcagaccatctggaaggaagagcccatcccctgcacagcccactggcacttcgggcaataactctgtggcacgtgggcatcacgtaagcagcacactaggaggcccaggcgcaggcaaagagaagatggtgctgtcatgaaataaaattacaacatagctacctggggatacttttttctttctgttttttgtttgtttttaattttagctttaaggagcacatggccagtactgtttcaggggaatattgggtggcgctggggtttgggcttctattgatcccatcacccaaacagtgagcatagttcccaatagatagtttttcaacacttcctttcctcccttccttcccgcttttggattcccagcatctattgatcccgtcttttcacccctgtgtacccaatgtttagttcccacttataagttagaacatggggaatttggttttgtttctgtgttgattcacttaggataatgacctccagctgcatccacgttactgcaaaggacaggatttcatgtttttttatggctgcatagtattccatggcgtccgtgtaccacactttctttatccagtccactgttgatgggcacctgggttgattccatgtctttgctactgtaaatagttctgtgatgaacatacaagtgcaggcatcttttcatagaatgattttttttttccttttggtagatacccagtaatgggattgctgggttgaagggtaattctatttttagcaaactagaaatatttaatgaagtacatgaatgagtgtcttcagaattgtacacagtgagatcaaatattttaataatgagcttgttatgttgaattctattctgaccatcactcactgagattttcttttctttctttcttttcttttctttcttttttaaagagacagagtttcactatgttgcccgggctggtctcaaaccccttgcctcaagtaatcttcccaccttgggcctcccaaagtgctgggattgcaggtgtgagccaccacacctggcccagattttctttaatatttgtctaatatctttccatctccctatattcaagcttcatgtaattttattttctggtaattctctgagcatagagctggatttgctagtttttttattttatgactcaacatgacagtttctatttttcatagaaaagttgaatctgggcctgttgcttaattttcttctttgtctttttaaatttacattaggactatgaagttttaattgaacagccattaacatatatggttatatgttgcatgatgtttcaatcagtgatggactgcatgtacgatggtggtcccctaagattataatgccatgttttgtttattaaaatttatttaagatttattttattatttttatagatgaggtctcactctgttgccccagctgggtgcagtggcatgatcatacctcactaggctcaagtgatcctcctgcctcagcatccctagtaactaggactacaggcacatgctaccacgcctggctaattattttaatttttggtagagacaggatctcattatgttgcccaagctggtcttgaactcctggtctcaagcagtccacccacctcagcttccccaagtgctgagattacaggcatgagctgcctgcacctgggctaatacagtaattttactgtaccttttccatgtttagatacagagatacctattattgtgttacagttgcctacagtattcagtacagtaacatctctacaggtttatagccaagggcaataggctctaccataaagcctgggtgtgtagtaggctgtaccatctaggtttgtgtaagtgcattctatgatgtttgcgtgacaacgaaatcaactaattatgaaatcacttaatgatacatttctcagaatgtatctcttttgttaagtgaaacattacaaaatttatttttttgggcacggtggctcactcctgtaatcccagcactttgggaggccaaggcgggcatgccgatcacgaggtcatctcctacaggcagtgcacattgactaagttcattccttgcttttgctgttgtttgctattataaataggattttgtcttcaattatatcttctaaaagttcttttgattggtaaaagctattgattgctgaatattggtttttgaccccgaccgtttgctgttttctcctcctaatcataattttttcttagttggtttccagtaataaagtcatgttgtctgaggccgggtgcggtggctcacgcctgtaatcccagcactctgggaggctgaggtggcggatcgagaccaccctggctaacacagtgaaaccctgtctctactaaaaatacaaatatttagccgggtctggtggcgggcgcctgtagtcccagctacccgggaggctgaggcaggagaatggcgtgaagctgggaagcagagcttgcagtgagccgagattgcgccactgcactccagcctgggtgacagagcgagactccgtcaaaaaaaaaaaaaaaaaattaatggctgggcactgtgggtcatgcctgtaatcccagcaatttgggaggctgagatgggataactgcttgaggccaggagttcaagaccagcttgggcaacataatgagacccatctctacaaaaaatttaaaaatatacattagttaggcatggtggcacgcacctgtaattccagctactcaggaggctgaagcaagagggtcacgtgagtccaggagttcaaggctgcaatgagccatgactgtgtcactgcactccagcctggatgacagagcaagactctttttaaaaatagccaggcgtgatggctctcacctggaatcccagcatttttggaggctaagatgggcagattgcttgagttcagcagtttgaggccagcctgggcaacatggcgaaaccccaaccctataaaaaaaaaaaaaaattagccaggtgtggtggcacacatctgcagtcccaggtacttgggaggctgaggtgagagaatcgctcgagctgggaggcagaggttgcagtgagctgagatcacaccactgcactccagccttgggtgacggaatgagacctgtctcaaaaaacaaataaataaaaataatttaaaaatcattaattgccagttacaatgaaaatttaaaacttttaaaaaatttagtctgatggcattgtaccactgtgccgtgttcacgtaaccctactaataatcaccctgacacacagccacatgcagatggaggaacttccctaaaagcaagtttgagggattaaatatcatctttgtcatcatatcctcctcttttcccttttcctcctcctccttgtcatcactactgaggacagcactgctggctgtgcccaggggcccttcttcctcaacgcccccagcaccacccaaagtccccctctgtggaatcggagcactgagtgtgttggcctcagggacactgaaggaagccgcccgccgcccgtcttctcagccttggagtctgttcaaccattatcattcaaaccacctaccatcaaaggtttgaatacaatgagcagctgctcctgcattcctccaggacacaggttcaccagctgggtgtctgtcaaagacaatgagcctccgagttggtccaaacttgactctccttgaaggtcttctctggccatcctcaaaatccacaggatgaaatgtgttcgatgaggacaactcactcgtgtcgcggcgtttggatgggctgcggcgtggccgcttctgccgtagagacggagccttcctgtggttcgcgcacttccttcctgaagcctcatatttcccattccgttgatacttggccacctcaacctgcaacgtgcagtttccagtgtcatcttcatccaaatgcatgaatgcaagatccacagcttccctcttccaatgatcgcacagcctgtctcctttaagatgtccttggttatctctgtaaaacttgaccttaagttcttctgtctggggatcgctcataataatgccaaatggacaggcgtgtgaatgcctccacggtaacgaccagaggcaaaccggcacatacacgtttgtatttctccttcttcagcatgaagccttcctttttctcccctctttgtgggatcagtgggtttggggtttttcttggtggcagagcagcgccgtcaccgagcagccgtcgctggcctgatatgcagcggtgaagtcttcactggtttctcttctgctcctgtgtgcttgcagaaaccgggctggctcttgattgggattgtaggctgcagaggctggggaagggcagacagcctcgggagacacgccggaaagggcggctccctcgtgctcctcagtgactcagggttttggccacatagctcccctcctccaccctcgctcagcaggctgcatccggggcggggctggcaggcaaagaggctgtgtcacagcccttcagagcctcaagctggggtccctagggtttctggacctcagatcactgtgaggcaggaggtcctccaccctccctccggcaaccctgaagtatgggaaggtgcgttctcgaactgccgaggggcctgttcctgtgtgggttgagaggatgggaagttgctgaaatccaacctctctgagagccggtgctgtcaccttggcctgagtatgctgaagacattaattccggttcccaagcaaaactgttagcaattcgagggctgggctcttgcctagatatcatctcctgttagtaccgggcaccctgatacattttctgccggtttttaagaatttttttttgagacggagtttcactcttgttgcccaggctggagtgcaatggcgcgatctcggctcacctcgacttccacctccctggttcaagcgattctcctgcctcagcctcccgagtagctggaattacaggcatgcgccaccatgcccggctaattttgtatttttagtagagacagggtttctccatgttggtcaggctgaactcacccgacctcaggtgatctgcctgccttggcttcccaaagtgctgggattacaggcatgagccaccgcgcccggccggtttttaagatcttattgctgaaaaacttaaaataaaaaataaattcagtatcagcagggcagcaggaattgccattaaaaaaaaaaaaagaaaattggaaatgactgcagccaggtgtgtgtgattgggccccgcgacctttttcttaggcaaacagggctttgtggatgcagaaagacttctttggttgtgtagtttgtctcagagcctctcgygggtggagcctggtaaaaagaggaaagagactcatgttgctcaatgtgaggaagcaccaggaattttggagaagttcccagcagctcaggagagtggctggtgccttgtcccaggggagagggaaataagcacaggcctatttctttctcaagacggaaaaaccgagccccagaaaatggcgataagatggggatgcaggaaaaagctagctaatgaacagttcagcagtgggcaccgtgtgggaacctctcctaagccgccctccctctgatggatgcatgctcaagtgatttcgttggcccttaaaggaaagtgttattccatcctgtaatcctagcactttaaaaggaggccgaggtgggaggatcacctgaggtcaggagttcaygaccagcctggccaacatggtgaaaccccgtctctactaaaaaatacwaaaattggccgggtgtggtggcatatgcctatagtcccagctacttgggaggctgaggcaggagaatcacttgaacccgggaggtggaggttgcagtgaggtgagatcgtgccattgcactccagcctggccacagagcgaractccatctcaaaaaaaaaaaaaaaaaaagacatctgcccaagggtcatagctgtagaggggcagatgtggtttgaacccagggcgtctggttcctctctggaagcaaccaaagtgcctgtgattggggtagtgacaaagcactctgagccgctgcatggcagatgctgtgaagagtcatctttgcctgtcccatatctattcccattttttctgattgtaacaccttgtttttttgtgtgtggtgggggaaccatgccctttcaaccaagctatgtggtgttcataagggtagcccctcctccgaccccaggagtggcagttcacagccctgactgatcacagtgttccgtggcctagctgtaaccaccccagggagtgagactgaactcaggggttcattggacctatcaggaaagagagacctttcttgtttctggacttggagctgtgatgaagtaagtgggtcaggggccaacacatagacagcgttggcctacaaatgcagcccaggcagaggacggtgcrgccaagccacacagagagacaacttcctagtgacacgctgtgaacwcctgcatccacccctgcctgaactggagcttttcctcttcagctcttcagttatgtgaggcaagatgttgccttttttgcttaatgctgtgagttgagtgtacagcagttacaatcaaagaatcctaaataatgctgcaagcatggtgactatctacatgggaatatgcagtactccagtgaaracaaaacataaattaattttggaatctgatgaccataatctaaaaacattcatagaggtatataaaaattataacaaaatttaaagtagcatatctcctcatgaagcaggttaagtgtatacacaaagaaggaggaggaaaaggtgagaaagaatctgcccttgtggggaagtgacagaggcagaagaggctgatgcagtcctgcatccaggcccagctctgccagcagctgagtacccctgaacaagctcccccacctcttcgggcctcactttccccatctatgaaagaaagggagtctagcttccatagctgccccagctgatacgcaaggtgccagtgtgtcctcagtcctgtcaggagaaaccttccccactagaatcccaggaggagcttgaaatcctgtctgggatcctgacggcccaggtgctgaccctgcctcgggttgtgtctgctaagaagtctgatttctgctcatctctccccatttctttcttcccataaagtgggctgatgcgctggaacgtcgatgcatcaaacacatcastggatgtgtttgatgagaatgtattgagagtaaagctgcccagaatccaagtgtgtgtcatctgaactcttgaatcatggatggaaggtatgtcctctgttgatgtctcgcagcctgagctgacaatctgtaagaaggttttgttatcttcatgytacagatggtgaaccgaaacttacagagctcaagtcacttgaccaggctccayccctacaagaggcagcacgcaaactaaaaaccaggcggccttttccaaagcttgtgctctgctccactgctggaaggaacccttcggggaattgaagcagcactgaacaaaggccatttttaagaagcgacaccagaaacctaaggcggggtccccggctcaacaaggatctcatgttttgtgggtcagagattcttgtgtcgtgtctgggtgaggtcaaaaaccatgcagagactttcacttcctgttctgtggcagacaagacatctgaaaagctctcctgcagcaacacttctagaygccaartaaatcacagcaagtgcacttttaaatgtgttactaagatcataaaaatgaaggaaaatgcccaagcatatccmcaacccctcaccccacaaccaccaccaccacaataaacaagttgctgacagyggattggcaagcgagtgtggaaccttaggctgcgttggcatcaaatactaataaccaagcaaaagggagcaagaccaggcctgggggctgtgccattgagaggtgaccgcgtgctggcagtcctcacagccctcgttcgctctcggcgcctgctctgcctgggctcccacttcggcggcacttgaggagcccttcagcccgccgctgcactgtgggagcccctttctggggctggccaaggccggagccggctccctcagcttgcagggaggtgtgcagagagaggcgcgagcgggaaccggggctgcgcgcgacgcttgcggggcagctggagttccgggtgggcgtgggcttggcgggccccgcactcggagcagccggccggccctgtcggccccgggcaataagggcttagcacccgggccagcggctgcggaggatgtactgggtcccccagcagtgccggcgcaccagcactgcgctcgatttctcgccgggctttagctgccttcccgcggggcagggctcgggacctgcagcccgccatgcctgagcatcccccactctccgtgagctactgggcagcccaagcctcccccaagagcgccacctcctgctccaggcgcccagtcccatcgaccacccaagggctgagaagtgcaggcacagggcgcgggactggcaggcagctccacctgggtgaagccagctgggctcctgagtgtggtggggacgtggagaacctttatgtctagctcagggattgtaaacacaccaatcggcactctgtatctacctcaaagtttgtaaacacaccaatcagcaccctgtgtctagctcagggtttgtgaatgcaccaatccacactctgtatctagctattctggtggggccttggagaacctttatgtctagctcagggattgtaaacgcaccaatcagcaccctgtcaaaacagaccacttggctctaccaatcagcaggatgtgggtggggccagataagagtataaaagcaggctgccctagccagcaatagcaacgaagtcggatttgtttccatgctgtgacggttttgtttttttgcttattgtaatagcttttgctgttgtactcttttctggtctacactgcgtttatgagttgtaacagtcgtcacaaaggcctgcagctttcactttctgcctcagccagcgagactgcaaacccaccaaaaaaaaaacttaactgtcacacccaccctaagggtctgcagctgggtttttgaaatcagaccaagaacccaccaattcagaacccaccaattcgggacacaccatgtgggcagctgaatcaagactttgtggaggagctccaaagtgggtagaaaagtacgttcacccttacagggagactggcaggcagcctttttccttctcggtagaaaaataaactcctgttccatagagtttggatttggaatttattgtacccacaaccagcagtcagcaaaatacaaaatgatcccaagtgataaaaaccttaagtatagtaagtaatttaagtaaacataaattctctctggagaaaaccatgatctcatggctattaagattcccattgattaagatgagtgtaatatatgctctccagaattatcaaacacatgaggaaacaaaacatgattggaaataaaaacaacaagcaatagatttaatcacccacagtcttcaaatattggcattacgggatatgtaacacaaaataatcatgtataaaatgtttaaagaaagacattcaaaagtgaccagatttgaaacacaaaagaacgtttagaattaaaatacatgaaagactgagtaaattaaacatagattagcggccaggcacggtggcttacacctgtgatcccagcattttggaaagccaaagtgggaggatggcttgagaacagaagtttgagaccagtgtgggcaacacagcaagacctcatctctacaaaaaataaaaataattagctgtgtgtgacagtgctcgcctgtagtcccatctactcggaagggtgaggtgggaggatcccttgagcccaggagttaaaggctgcggtgagctatgattgcactgtactccagcctgggtgacagaatgagaccatgtctcaaaagtaaataaataacaatatagcctaatttatagggttaaaaagcagataaaattataatcctgggcaaaaataatatatagagggtataatccaaataaaaacagttcttttttcagggagggggataaagctaatgatttagatttttaagtgatatatgtatattcaagtttctaggataagtattaaaataatagaaattgaggtcaaattagtagagggggaaaatggaataagaaaaaatgctatcatccaaaagaagataagagtggaggaaaaaagtcaacagtaaaagaaggacaaattgaggtgcaaaatacaatggtggaaaaaaaaaatcctaatatacctgtaatcctaaaaaaggtaaatagaaaaaaatgtcagttaaaagagtctagctagataaaaagcttaaatttagctaccttcagtttacaggagatatatctaagccatcaacacaaaatgttaagggtaaaaggacggaaaaagatttaccatgcaaatactcaaaagcaggtaggatcattgtatgaatatcaagcaaaaatagacattagagcaaaaatcatgattaggaataaagaaggtctctgtgtaatgatgaacgcatcaattcaatatgaagttacaccaattccaaacttggtatgtgtctaataaacagcttcgaagtatataaagcaaacactgaattatgaaaagaaatggaaaaatccactatcagagtgggagacgtcaggacacatctcttagtaagtggtagtcaaacagatgccattaaaataataaatattggccaggcgcgtggcttacgcctgtaatcccatcactttgggaggctaaggtgggcggatcacctgaggttgggagttcaagaccagcctgaccaacatggagaaaccccatctctactgaaaatacaaaattagcctggcgtggtggtgcatgcctgtaatcccagctactcaggagactgaggcaggagaattgtttgaacctgggaggcagaggtttcagtgagccgagatcgcgccattgcactccagcctgggcaacaagagcgaaactccctctaaaaaaatttttgaacaaaattgatctcataggtataaaaaaatcactgcacccagcaatgtagacaataccaggtgttagtgaaactgtgggtcaacagttgaattcatactctgctggtgggtagtgtccattagtacatcgttcaaaaattcactgtaaaattgagcatttacacatctcactatactaaccaattagcaaataattaactacaggtccacacatcaagatgtgtatatttcataattataaagttgagtgaaaaatacaggttatagatatcactcagtccaagtataaaaacataccaaataaaaaatcacctgccaaattcatgtggaaaagcataattaaatattcaggatagtaatgtgatgggagggggcacacaggtgtttgaaggtatttttaatgatctgtgtcttcagctaaatggtgagaactcaagtattcatttcactgtcatgtataagtcaatttctatacagtttacttttatacatgtgaaatagtttgtgataagaaagagtaatataaaataaatctggatgcatattgtgttaaaaatcctcttggccaggcacagtggctcacacttgtaatcctaccactttgggaggctgaggtaggggaattgcttgagcccaggagttggaaactagcctgggcaccatagtgagaccctatctctacaaagtattttttttaaagttagctgagcatagtagtacatgcctgtggtcccagctactcgagaggctgaggtgggaggatcacttgagcccagaaggttgaggctgctgtgagccatgatcacactactgcactccagcctgggtgatagaacaagaacctgtctcaaaacaaaacaccacttgttcccccgccaacaccaaaacttcttgaggcctaccaccgaggcagggcatgttgctttggggacaatagctgagtcaatggcaccttcagagtccacacggaggtctccttgggagtgtgagccctgaacactcaagggcatgtccaccctagtggacacatgtccatgagcctgtgcaggatgtaaactcaacagtgaccccagaatggcagggtcaaagcccccatgctagtggataaatcagactttgctattatctcacctctcaaggtttgaaagaaaacactcagcattcttgtgctattaagggtggaagggcggctattaagggcatttagggaccgatgagatgaactggattttgtttttgttttgaggcagggtttcactctcgcccaggctggagtgcagtggcacgatcatggctcactgcagcctcgacctcccaggatttcccactcctgtgcagcagaggatgccaggtgcacttgatgtcgggctggctgtcacgaatatgcccttgagctgcacaggctgcaggtggcagcagggccctgggacaacctcacagacccgccccactgacgctggctcctagagaggtggttgctggccgatctatcaggggcttctcctttttgccatattcagattggagccataaattaaattctcaggaaaaaaaattaagctacttttagaagacatgaaacatgggctttggggatcaggattaaaaactttaacaataacattgcttaattctcaactcctattcttggtaggatgaactgaaaccagtgattttaccattatgtacaatattttttcttttgaagggcctgaacagacggttccaaatccaggctgtatcattataatcacagtttccctggctcacacttcagcgttttgcctttcatgcatctctctctggcacagaagctatttgcccatttgtcttccagaaagacgagaagtcttatagggatttctgaaatgagaatgcgccacactaggggtgggtgaggtgcccacataatcgaagccgtgagacattgccactgccagatttctccccattacctgtatcaccacccaaagaggatgggtctcaggctcccaggatctttggccattctttctgctttgtattaggtatcaaattcccttgtgcttggaggagaagaaaacctaaacattcttatgatcagattgatatttgtcagggtaggaccatggctaagagcaaaagtcagtgccctggtgaattcaacatgcagcatgaactattattattctcagaaggacaaggctaaaacctctcacctagaatagccacattatatcagacttttcataaagtttagttatttcatttggagagggcatagatttattccatcttattttccaagactgtgtattgtaaaattagacgaaagtaaaccttataagttatcccttaaaatagtgtaaaatgatcaccattttaagagtatgtactaaaagtcttacttttcagctttgactacagtgatgcatttgctaatggttttcttcttccttgaattatgactaagaggaattttttccccatgaggttctttcgctgctcgtgacttaggtaagaaagtggtcatcatctacgtgcatccttgaagaacatgggtgtgggtgaactgagcaggcagggctgcacagtcactgtgtctgatttacatgccatggactttgagccaagggccacaaggaaagacatcgcttgtgagttactggattaattaatgtcttagtctcttctttaaggattccctttctttcttcttaagaaactgtcccactatgaccacatattgaacggcataacaagggccaggaataggggtttagagaa

SEQ ID NO: 97367 - DNA, 25691 bp, Homo sapiens
gccccagacctctgtctattggttgtttttgtttgtttgcttgcttgctttttctttatttctatacttttttttgttttgttttttgagacagggtttcacgcctgtcacccaggctagagtgcagtggcgtgatctcagctcactgcaaccttcgcctcctgggctcaagcgattctcctgcctcagcctcccaaatatctggggctacaggcatgccaccacacttagctaatttttgcatttttttttgcagagatgagagctcatcacgttacccaggctggtcacaaactcctgagctcaagtgatccgcctgcctcagcctcccaaagtgctgagattactggtgtgagcctccgcgcccgcccttcagttggtgtttgagatctccctggtggtgggaactagtcaaagagtgtccaggtggccacaaggtcctgttggttcttccttcaaaatggctcctgtcgtgcgagaccaggttttgggtgtcttcacccactctctgccctgagatctgtgtcccaagggacaccagccaccctgatcccacccgaccctcctctgctcctagagtgatggggtccccatgagaggaaaggagcactgttgtgagcagtgtgggatgagaggaggtgctgtcacagcttggggaagggaccctggtaaccagcaggtaggtcaatagttcccgttccaagtaggctcttgtgcccattttacagatcaggaaatggagacaggtggaggagccaggcgacttgcccagcctttacaggacccatggggcaaagccgtaggtgaagtcacagttagagattccagagctctgaggagacggcgtccctgcttgggtggggaaggtcccctgctggcccccagacgatgagtctttgttccctccccaggggctggcctggccctcaggcctgggaggtggaggtgccgagccctgggaaatagggcagtcctgggcttccggtgtcactgcacgcccctccccctcccgcctttgtttcttggcctccacagcctcattctctctccctccccctcactcaggctcctcctctgcccccccttccctgtctcttcatttcttctctccctctccctttctctctctctctctctgatatgtcctcccttcccccactcccagcacaactacaatcaggcagctcatctgtgtctatttccccgcctttcacattgactttctccccaccctggggaccgagggcatcctggtgggaggccacgccacatcccagccagtggtcgcccctcatcttgccagcctggggcagtctgagctcccctttctcctggacatggggggagcttttgttctgagtccttagcacaagtggtgggagaggccctgctctaagaagggaggggccccagtggggccccaggcggatgacagaggggccttgggttgggtggggaggcagccctggcacacaggtgacgcacacctggcaggctctcttcctgccctggatggccctgtgccaggacataaacagaagggtttagcctgggagatggaacagagcgggtgaggagacacgaggcacaatgctggcccaggaggagggagaacagagtgataccgggcctccccactcctcatttccgtgtgcgataggcaggcagaacacacatgcgaaacgcaggtaaattagattccctcctcagcagagccccttctgcatacacacacgcacgcacgcgcacacacacacagcctgcctggccgccccagtgaacaagacaacatggacacggggcctgcccccataagcctcacaaagagagcattacagggtggtgtgtgttctactcagccaagtctccaggccagtgtaaaagaaagcgtggggccaactgcccaggtgggcagtggctcaatgaagacttctagtagaaggagagaccccagttcccccagccggctggggccctggaccagccagccaggaagcagcccgagccttcatgttgcagtttgcccaggtcgtgcctacgtgcccctgctggcctgtggtgacccaggacagctcctgagaactgaggagccaggctcgggtgtgacctccgcgggtgcatagctgcaggagcacagatgggacccagctgtggggccacacgggcctggctgcagacccaactcccccttcattgatggggcacttgggagtgtgttattcaagcctggatttcctggggcgtgaggtggggagcgcactaccccacccctgccccccgggttgttcctagtattaaatggctgactggggacctcgtgagtgtctgtaatgagaagctgtaggtcttccgtggtgtttgtcgtcagttgttggcagctctctgtgcccctgccctgcccccacttaggcacaaaccctcaggaacaaggactctgggttagtccctttctacagccaagcacaggctcctgacacagacgcaccttctcaagtccaaactacctgttcatatgggaaggggtttgcttcaggtgtcctggtgtgactataaggagtggccccttgtagaaaggggcccggtgtggacggtcagctccatggttacccttgctgtagggaaccacacttcagctcccacaggcagttcgctggctgacgtttttgccctctcctcacctctaaagcagtgttaactgtttccttatgcccgcgcccttgaggttggcgggagggggctgattcctggtattaggctgcaggggaaaggagagggaagggaactaacgacactgacatcctcatctcactgtcccatgagtcaggagcctcttcccccccatagagatgagaatcacctgatgtcacacggctagtagacggcagagcctggattgaactcagcatccagggccaagggggaagcactggcttggccattgatgctcagttcctccttcttgctggtcctgcctttggggaagtttacaaaaactgctgaacacatcatttgcccaaaccccacaacagacaggagggttgccgctgggtgctgtgtcagacggactgtcgcgacaggaggcagccatgctcctcagcgtgctctgcaaaactgacagtggctggagggcactgggggtggctgtggtgggccccaaggggcaggacccctgcctcattcaccttgctgtctccaggcacaagccctaacccatagcagggatttagcggctatttattgtacaaatgaatgaatgagttctctagtggttgtcctcagaatcacttaagctttgctgaatttggggcccaagaatggaaacatctcttggctctgtggcttttttcagaaaagccttctcccagagatctgggcagataataatggttctttttttcttcctttgagacagagtctcactgtgacacccaggctggaatgcaatggtgcgatctctgctcactgcaacttccgcctcctgggttcaagtgattctcctgcctcagactcccaagcagctgggattacaggcacccaccaccacgcccggctaatttttgtatttttagtagagatgaggtttcaccatgttggccaggctggtctcgaactcctgacctcaagtgatctgcccgcctcagcctcacaaagtgctgggattacaggtgtgagccaccatgcccctgccaacagtgattctttacagttggttagggccttataatgaaccaagctgcttcacctgtgttaggaccgtgggccctcacaacccttccatgggtgagtgttttcatccccgtttttcagatagggaaactgagccactggcatgactttgcttagtcacttgcaagtgactgagctggcactcgaggtcctcgctgactgcatttcccagcagctggacattggggtggggtgtggtggtttggaagcacgtttagcccctgcggcctattccagatgcaccctgaccccccaggccgaggtttccttctatctgatcccttccacgagagcctcactctaagcttaatagtttaatctttggtgtccgtttcaaggaggctaaattcctgtctggggtatttttagccgtcctcaggaaggggaagctccgctgggcgctggggggagggggacgccttgcccggagccggtttcctgaggaagggccgccgaccgtgtgcctgaccgtggccctgggagaggctggtagttggtccgttgggagccctgggagcaaagcaggcgagagtcgccccagtaatgccatcccctctcctcagatgtgccaggtgttgaaccagggcaaggggtataggcccaggaggaggtcgccactgcctggcgtgctgcagtccttggaagcctggagagggcacgagggcaggccaggagagccgggatggctccaggagcaggtggacctcgagccacgcctcggaggctggtgggaggagcaggggtcagcagggttgggaaaaggctgccccaggtgggaagacccatgggtgaaaagaccgggctccacagacggctcacggagcaggtgcctccatatgtggctggagcccccagcgagggaagaggccgctgtgctgggggtttgtacctgggcacgtgggcacattggcactatttagaagatcatgttagaggcaggtacagtggctcatgtctataatcctagcatttcggggggctgaggcagaaggatcacttcagtgctggaggttgagacaggagtgagccatgattgtgtcacagtagcctgggcaacagagcaagaccccatctctaatcaaaaagaaagaaaaaaacgttagttgagagattgtgaatgtgaacttgggagcctgtttgagcattcaattcggatagtggcctcaaacatgttagctgtcaaggagctcttctttcaaatcagatcggacatggaactccaacgtataaaatcagataaaagtgatatttttatcagtataaatttagatatttaaatgtataacatttagctaatcaagaaaaacaacaactgcttgtgatagatgcagatgtttatcgtcggggctgacaagtgacagccagtgtttgagattggcctcagcacctagtttatttttttatattgtgtttctgccatacgttctcgttcatacagccgagccattaccaataatgacagttaacacctcaccgcacagtcccaaggtctgtgcaaattaattactttggcaacaaagccagtggggctacagtagaatgtgttagaatgtggcacatattacatttgagtaggtgggccttttaaaatcagtttttaaatagtggaatctttattttttgcatttttgaatccgatttttaaggatttttttttttttttttttttgagacagagtgtcactttgctgcccaggctggagtgcagtggcgcgatctcggctcactgcaacctccgcctcccaggttcaagtgattctcctgcctcagcctcctatagctgggattacaggtgccggccaccacgcccagctaattttgtatttttagtagagacaggatttcaccatgttggccaggctggtctcaaactcctgctgacctcaggtgatctgcccatcttggcttcccaaagtgctgggattacagatgtgagccaccatgcccggtctttttaaggaattcttgaaggacctgtagaacacaatttgagaacaattgaggaaatcccacctccctgttgtacagatgggaagactgaggccagcaagggggcagagcttaccccaggatctcccagggagatggaggagatggtcagatacacagcaggaatcactgctccctataataacaagtgtgccctgttcccaaggccaggagtagaaaagacatcagagccagacacacccaaaatcagccaagcccttgtctgtgctgtgtctgttgtctgtctgtgcaggagtgagccagcaatattaaccttcccttctccacccacagcgatgccctcctagctagccgtcacgggatggagggcttcatggactcagggacacagacggacgccgtggtggtgctgtccttggctcaggccgccgtgcttggcctggtctccgaaaatgagctctttggagctaccataagcgccgaggccttctacccggacctggggcccgagctttcaggggcagccatgggagagcccgagccaccaggccccgacgtctaccagctggcctgcaacgggagggccttggaggagccggcggaggaggaggtgctggaggtggaggcagcctgtgagaagcacacccggcggaagacgcggccacctgtgcggttggtgcccaaggtcaagttcgagaaggtggaggaggaggaacaggaggtctatgaggtttctgtgccaggtgacgacaaggacgcagggccagcagaagcccccgccgaggcggccagtggcggctgcgacgccctggtgcagagcagcgccgtcaagatgatcgacctcagcgccttcagccgcaagccccggacgctccggcatctgccccgaaccccgaggccggagctgaacgtggccccatatgaccctcacttcccggccccggcccgggatggcttccccgagcccagcatggcgctgcctgggccagaggccttgcccacagagtgtgggttcgagccaccccacctggcccccctgagtgaccccgaggcccccagcatggagtccccggagcctgtcaagccggaacagggcttcgtgtggcaggaggccagtgagttcgaggctgacacggcgggttcgaccgtggaacgccacaagaaggcccagctggatcggctggacatcaacgtgcagattgacgactcctatctggtggaggcgggcgaccgccagaagcgctggcagtgccgcatgtgcgagaagtcctacacgtccaagtacaacctggtgacgcacatcctgggccacaacggcatcaagccacactcgtgcccacactgcagcaagctcttcaagcagcccagccacctgcagacgcacctgctgacgcaccagggcacccggccccacaagtgccaggtatgccacaaggccttcacgcagaccagccacctcaagcgccacatgctgctgcactcggaggtcaagccctacagctgccacttctgcggccgcggcttcgcctaccccagcgagctcaaggcccacgaagtgaagcatgagagtggccgctgccatgtctgcgtcgagtgcggcctggacttctccaccctgacccagctcaagcgccacctggcctcccaccagggccccaccctctaccagtgcctcgagtgtgacaagtccttccactaccgcagccagttgcagaaccacatgctcaagcaccagaacgtgcgacccttcgtgtgcactgaatgcggcatggagttcagccagattcaccacctcaagcagcactccctcacccacaaggtaaggccgttcccagggcctgggcatctgcctgcccctcctgccactttttcatccagtactttccaaagtcccagatgggaccatttaggtggtctcctagttttatcgttacgtacttattttgatgagtattagaaatcaattagtattagaaactaattgaaattagttttttaagtagtaaagctttatgcattcaaaaacatgtatttggccaggcacaatggctcatgcctgtaatcccagcgctttgggaggccaaggcaggcagattgcttgagtcctggggtttgagaccagcctgggcaaaataatgagaccccatcgctacaaaaaaatttaaacatggctaggcgtgatggctcatgcctgtaatcccagcactttgcgaggccaaggcgggcagatcacctgaggtcaggagttcaagaccagccttgccaatgtggtgaaaccctgtctctactaaaaatacaaaaattagctgggtgtggtggtggatgcctgtaatcccagctacttgggaggctgaggcaagagaattgcttcaacccgggaggcagaggttgcagtcagccgagaccacaccattgcactccagcctgggcaacaggagcaaaactccatctcaaaaaaaaaaaaaaaaaaaaaatttaaacattagccgggtgtggtggcatacacctatagtcccagctacttggaaggctaaggtgggaggaacacctgagcctgagaggctgaggttgcagtgagctgaaatcacgatactgcacttcagcctgggcaaccagactgagaccctgtctccaaaaaaaaaaaatcatttttataacccctgcaagacccaagraacacagtttgaggatcactgaagtatcttaccctccctattttctagatgggaggacagaggccagagagaggccaggatgcaacagggaggcgtcctggctcagtggtcagaagtacagagggtgtcctttgttccttgtcattacaaaagcaaatcaaaacctgtgacttccctttaagaacaggctaaatatatttaattttcaaagcagagaagatgtaaggaaaaatatttgttatggaaaagtacaggtagttctagaatatggctaaactaggcacagtggctcgggaaggcagaaattgagcagcactttctaatctaccatgtccctaaacccagccttgacccgtactcccctgccctccattccccgccttcagccaccagcctccccgcttttcagccaatatcacctcctctgagaggccctcatatccgggtaggtggaatgaggccccttgggtcccacaatcccactctggtacttggctgccccatggtttccaccgaaatcccaccaactttacccttcaaagctgaatgtacatagagcttcctctccccataacggtggcctatgagtgatactccaggtcaaacttgtgaccctgtctctcacggtagacactatagggagttggggagctgttaataccctgccaggcctagaaaccagcaatttgtaggtttcattgcagaggctcctgcagtcaactgctagtagctgcctaaaatgtaatgtcaagaaagagtctagccaggcatggtgctgcacacctgtagtcccagttactcaggaggctgaggtgggaagtttgcttgaacccaggagtttgaggctatgattgctcctattaatagccactgcactctagcctgggcaacatagcaagacatttttttttttttaagaaaaaaaaaaaggaagaattctgggctggatgcaatggctaacagtaatcccaacactttgggaggctgaggcaggagaatcacttgagcccaggagtttgagaccagcctggctaacatagtgaaaccctggctctactaaaaatattttttaaaaatagctgagtgtggtggtgtgcacctgtagtcccagcttgaacccaggaggcagagattccagtgagccgagatcacaccactgtgctccagcccaggtgacagagcaagactctatctcaaaaaaaagaaaaaaatcaaaaaattagccaggcatggtggcacacacctgtggtccagctacacatgagactgaagcaggaggattgcttgagcccaggaggtcaaggctgcagtgagctgtgattgcgccactgcactccagtctgggcaacagagcaagactctgtctccaaaaagagaaaaggattctgaaactgaatctaggcttggcaataaaaccctatgatggattgttaatgtctgcaaggagtgattgtgcagggtgacagcatatatgctatatatttgccatctttctcctctactgggggacttaaaaatcccaagtccagggcctggcacagtggctcacgcctgtaatcccagcactttaggaggccgaggcgggcagatcacaaggtcaggagttcgaggccaacctggccaacatggtgaagccccgtctctactaaaaatacaaaaattagttgggygtggtggtgggcgcctgtagtcccagctactcgggaggctgaggcaggagaattgcttgaacccgggaggcagaggttgcagtgagccaagaccgtgccgctgtactctagcctgggcaacaaaagcaagactctgtcttaaaaaaaaaaaaaaaatcccaagtccacagagtgttaatactgtgaagaaaagctgaaagcaaaaaccaaaggctaataaaactggaaatgtccctattatcagcctaaatttgtacaatgtgcacatcatgtgtttataaaagaaactcctgaatggcagggccccctggtggtcatacacatctgcgatgtgtcaggagggggtatacagcacaagacacagtccctgctgctaagagacatagacacgggaaccattaagttataatacaaagtttttataccaaacaagcagttaagacagcagctgtgaccacagacacatgtcccactgggttcctactaaattactaactcatcaaaaagaaaacagctcccaacttaaaaaaaatttcttttatttatttatttttactctttttttttttttttttgagacggaggcttactctgtcacccaagctggagtgcagtggtgtgatctcagctcactgcaacctccgcctcctgggtttaagcaattctactgcctcagcctcctgagtagctgggattacaggcgcataccacgctcagctaattattgtatttttagtagagatagggtttcaccatgttggccagcctggtctcgaactcctgaccttgtgatctgcccaccttagcctcccaaagtgctgggattacaggcatgagccaccgtgcccggcctttttcaaattttagagatagggtcttgctatgttgtccacactagtcttgagttcctggcctcaggtgatcctcttgcctcagcctcccaaaatgctgggattacaggtgtgagccaccgtgcccagcccagctcccagcttttatcctaattttcctccatggataataaattggacccctttgcacacaacaccctgtcctgctctgggagtgacctccaaaccgtagaaaagaaagttcacagtccaaaccagtgggttttctcctggaatccatgtctcctgggggtgaatagcccaaagtccatcaatgataagaatcatctgggggccctgttgagaataaaaattcctgggcccatcccaggccccatgaattagaccctccagggagcggcctgcaaggctgtatgttggatgagaactacaggtggctgttatcaccagggaaattaggaaaacactttcaagagatgagtggataggctctgggagtttgagacccttcgaaattctacatagacctaagtgccatttttgggggggtgtccatagcttcaatcatattatcaaaagggtctgaaccaaaaaggccaccaagagacagcatggaggataaaaacacatacacgtgtccttgatctgatgaaatagtccacagacagcgggcagaccctgtgtcttcttggcgacagacccctgccgcctagtgtggtactggcttggagcaggtgcccggtaaatggttgttgaatgaatgaatgaatgagcacacatttgccttagtgcactagtacagaccttatgtacacatccaccctgggggcaggagacagcaggtatctggatcgttacagtaaagcacagcctatttctattactgaaaggcttcctggagtaagtggctctgcccccacattcttcrgtggttttaaacaagtgttacctattttggaataccctcaaaaagagacatttcccagaaagtgtgcctttgtgatgctatggccctgcccctacccggctccccacaaagggtcactgccagaggctgtgcccattgtgtggccctgaccatcaccccccaccccacagggcgtgaaggagttcaagtgcgaggtgtgtggccgggagttcaccctacaggcgaacatgaagcggcacatgctgatccacaccagcgtccggccctaccagtgccacatctgcttcaagacctttgtacagaagcagactctcaagacccacatgattgtacactcgcccgtgaagccattcaaatgcaaggtacccggtcatcaggccccggggctgggacctccccgagggtggtctggaatcagcatgcctgcagcagctgtggcccaccaagcgccagcctggccagtgcgggcaagaggagccccggcygggtgaaacttagcctgggctttgggggttgggagggcaggcggggattcacatcctgaaagctgctgaagttgggtttttctgagagctggggagggagtgaaggtcatggtgcagccacagagaaaggaccccagcctgagggcttagtgcagctagagatccaagccctgggtttctgataagtgcagctcagagaaagtggggcagactcacaggagcagtgacccccaatggatggcttgtgtccctgtctctcgggtgtctggggtcacatggaaaagcataaagagagaactgtccataaagaacaggattctgggccaggcatggtggtgcatgcctgtaatcccagcattttgggaggctgaggtgggtggatcatttgaggtaaggagttcgagaccagcctagccaatgtggtgaaaccccttctctactaaacatacaaaaaattagctgggcgtggtggcacgtgcctgtagtcccagctactcgggagactaaggcaggagaatctcttgaacccaggaggcagaagttgcagtgagccgagatcatgccactgcactccagcctggacaacagagtgagagtctgtctcaaaaaaaaaamaaaaaaaaaaaacaaaagaataggattctggcccagccatagaggtgggagtgggctggggtccggggaaagcaggttccccacaggctcaggacaccgggttgatgtgttctaggtgtgcgggaagtccttcaaccgcatgtacaacctgctgggccacatgcacctgcacgccggcagcaagcccttcaagtgcccctactgctccagcaagtttaatctcaagggcaacctgagccggcacatgaaggtcaagcatggcgtcatggacatcggcctggacagccaaggtgggtgggccaagcgyaatggacagagcaggaatgataccaacatgacgcactcaggagcctcctgcccagttagaggagtggggaggctggccaaggctgagacttcgttggggtgggctcaggtctggaaggggggtaccctggaaggccatgatgacaataacgatgggatatttatgtcttcttcaaaggacttaaatgagatcacgtaaacaatataataaaaatcataactaacatttattgagtgctaactgtgtgccaggcctttattaactcatgtgatcctcaaagcgaggttggctctgtcattgtcatcgttttacagatgcagaaactgaagaacagagaacttagatagctcatgcaagatgacaacacagcaggaggtgacagacactttatttcgttaccgtgagataatatttcaaataagtgtatgggaaagaaagttagaaaggggaaaaaatggcagccggaaagataagggagagccaggtgaggtcccaactccaagtacaccatgggaggtcctaagcaagggacatgcagaggggagatctgagcttcccagcaaccaaggcaaaaaagtgtcaatcagtcacactcttcacaagtgcctgccagagactataacccacatactcatgaaagggccagacagccctgacgttaagatctgggagaaattttaggagaggatcctatgcctcagcagttcgtagaagtttcagaggctgtcagaaaacatcccaagtgttagcggtagcctttccctccagcagtggtcagtacttaaagcatttctgttgggtgacagcaaagctgttagcctctctggcctcatggtggggagggactgctgtggagactccacaggaaggagggagccaacagcgctacagggaggctccttctacagttgggagctatttctggtgctctggctgggcatgatggctcacacctataatcctggcactttgggaggccgaggcaggaggatcccttaaggccaggagtttgataccaaaccaggcaacatagtgagacctggtctctacaaaaatatttttaaattagctgggtgtggtggcgtgtgcctataatctcagctacttgggagtctaaggcaggaagatcacttgagcccaggagttcaaggctgtagtgaactgtgatcggaccacggcactccagcctgcgtggcaaagcaagaccctatcgccaaattataataaagaaattctggtgtgcctctgagtcacaccagctgggaacatgctttggcagtaaccaggtgagctgacttgccacgtgggattatttactggaatgcagkcaggcacgcgggaacagctgcagtagcttaactctggttttggaacagctgaccagtgaatggcctgggttttctggcagaaacaggtatctcagttgttttgttttgtttttcagttgtctattaaggttgcttccagtagacgagaatgaaaccccgtcggctgctcttggtagctccttgctactcaaaatgtggtaggaggatgagcagystcggccccacctgggatcttgctggcctctcagctccacccacacctgctgagtcagactctacacttcaaraagatctctgggccatttgttgcagtcaagtttgagacccactggaccagactagtgcctcagagtctcctggagggcttgttgaaacaaagtgctggccccacccccagagtttctgattcagtagatctggggtggggtctgagacgctgcctttcccacaagttcccagttcttagcaaagcagccgctggttcagggacctcaygttgagaacctttgatccagactgcagagggctggctggcaaatcagctgcatgttgggagtcacctgaggaatgttttaaatgctgatgcctgagtttggacctgaggttcaaatgtaagtgatctggaatgtggcctgggatcaggatttttgtaaagcactttgggtgagtccatgtgcagtagattttgagagctgtattctagtggatctgccctgttgctaacccaccagaaggaaccagagcagaacgtgcccttttggaaataactgggaccatgaagagactgtcagtgttacagctcttttagaatttgttaggctgggcgtactggctcacgcctataatcccaacactttgggaggcaaatcccaaggtgggcagatcacctgaggttgggagttcgagaccagcctggctaacatgatgaaaccccgtctctactaaaaatacaaaaattagctgggcgtgttggcacatgcgtgtaatcccagctactcgggaggctgaggcaggagaatcacttgaacctgggaggcagaggttgcagtgagccgagattgtgtcactgcactccagcctgggtgacagagtgagactttgactcaaaaaaaaaaaaaaaaaagcattcatttagcaggttttccagtttttaccagaaatcgccccacccccatcccaccacccaaacaagattttttaaaaagactgtccctgtacaccttgttcctcggggtggttaaggcacaacctctttctatatgagctcagtcaccagggatgcttagaattcctctattcctggccgtaccagatgacagaaggaagcgattggccctggaatgactgggctccaggtccccacctccctcatacagccttggtctgggaagcccaggcttgatgcgtatgcagaaggaaggcagcatacattctagacagaacgatctagtaactatggggctgtcatttggggaggtggatcaatgtccttataaaaaatgctacagactattctctggggcccacaggacgggaccatagacttaataaacaaaatggggacggtgtacagagatccacaagtagaaattttctcaaggtgctttttttttttttttttttgagacggagtcttgctctttcacccaggctggagtgcagtggcgcgatctcggctcactgcaagctccacctcctgggttcacgccattctcctgcctcagcctcccaagtagctgggactacaggcgcctgccaccacgcccggctaatttttttgtatttttagtagagacggggtttcacggtgttagccaggatggtcttgatctcctgacctcatgatctgcctgccttggcctcccaaagtgctgggattacaggcatgagccactgcgcctggcccccaaggtgctttatttagcttgtttttgaaaccagctgtgtaacatgagggtgtggcactaggactgagggaagaaacagcccaaatctataagatatgggtcaagtgaccttgttttataaagtccggaagactcacagtgggttagatgctacaggcacaagtaacagatacccattcagactggcctaaacaataaggaaatccattaagaaatggctcaagaccaggtgtggtagcgcacacctatcgtcccagctactcgggaggttgagttgggaggatcactttgagtttgaggctgcagtgagccatgattgcaccactgcaccccagccttggcaatagagcaagaccttgtcaaaaaaagaaaagaaatggggccaggcgcagtggctcacgcctgtaatcccagcactttgagaggccraggcaggcggatcacctgagattgggagttcaagaccagcctgaccaacatggagaaaccccgtctctactaaaaatacaaaaaaaattagccgggtatggtggcgcatgcctgtaatctcagctacttgggaggctgaggcaggagaatcgcttgaccccaggaggtggaggttgtgatgagccaagattgcaccattgcactccagcctgggcaacaagagcgaaactcggtctcaaaaaaaaaaaaaaaaagaagagaaaagaaatggttcaaagtctaggccctcttcagagctggctgattcagcttgccaacagtgacatcagggtgaggcttcctctgtccacagcattagctgcgaatatcctcatggtcacaagatggctgccagtggccgtcagggtgtgtgcttccttgttcacatccagtggaagagtgacagcctgctccccttagctctctgacaccaatgagaaggtgctaagaacttactagcaggcctttcctcatgacccattcaacaggattgggtcacgtgcctattcctgaaccactaattgggaagggatgggattactcttagaccagtggttctcaactgagcatgagtttgtcttccaggtgacagttggccatgtttggagacatttatggttgtcacaactggggtgatgctactggcatctcatgggtagaggccagggatgctgtcaaacatcctacaatgcacaggacagcctcacaacaaagaattatggccctaagtgccaaggttgagaaagtctgccttagacctgtcagggctgcccccagcctggggtctgtttcccccaaaacacgcacatctcagcggacagggccagaatgcactttgggggccagccacagcccctgccagcctcccagttcccccagatcctaccctgggcttcccctgtaagagctttataatgagatttcaattttataaaattayaaggggcctcttaggagtttttgcctgacatatctttatgaacctaccctgagtgtttgtccctggagagccaggcccaaggataccaatggctagaaccaacagaaaagcacagctgccggcaggaggcctcaccctcccgcagtgtgaggcagagcagcacagtggctcagaacaacagcatgtgctgggtgacctttggcaagttgattcacctctctaaacctcagccttctgagctgctaaatggggctgttgtgattgctggatgaggcgaggcctgcgaagtggctggcatgcagcaggtgctaatgagtgytgcaaaggtgatgtcacgcaggcagcttcccgtggccagagaaacattgcagagaagggataagtagggcttagtgactttgacgggtcaatggaagaatgacccaaagaaggcttcaaggccaggcctgcagttctccaccacaaaggccctcactgatagcacccactcccccacactcagctttggggcctaggtctggtcacccagctagaagccacaggaccctgaggcgtccgagggtgggaaggctgagaggcagctgagactcctggaggccgtgactgggaagccctctctttagaaaggccatcagcttcctgcgtgggggtgactggctcctcccgagagatggcagccaggtctgactgtgcccctctcttacagaccccatgatggagctgacaggcactgacccttcagagctcgacggccagcaggagatggaggacttcgaggagaacgcctacagctatgcgagcgtggacagcagcgccgaggccagtgtcctcactgaacaggccatgaaagagatggcctactacaaygtgctatagcgcaagctgggccacccctaacgggggccgggggcgagggcatgggggtgagacccatgggctgcaggctgcacctcctgcagccgagaaacaagctactgccccactgttctgagccctccctccccgagtcatttgcaccactagggacctttagaccaaatggagactgtactactggccccggctgtgagccagcacaggcccaggcatcccagcaagggaaggagaacacgcgaggcccagatctgggtctccctggcctgcttccgtggggagtgggagaagtggggccactggggacaggtcacaagggcaccggccctcggggtctctccaggcccagcagagctcttcaggggtcctgacactggaagaagagaccacttgagccatgtctttttcacggccaactcctgcctctaaggatgtctgagctcccctctggccagtactgcccacctctaccttgtccaggsccccttccccgccctgtcgacggaccgccaggcagggcactctgccttctacctcccggggtctcccatgcgctcctcaagccaggtgtgcacgtggccctggccctggcctgcaggacagctggggggcacccagcccccagaagacccctgtcctacatccctttctggaagtgagtgtccctacagtggattgcaacacatgtcgtccacttcgaccctagctggagtgcctcaccagggggccccactaggaacaaagccaggacaggccccgcgtcaggcacacactaacaaaaccagaagcatggggcagggcagggcggagtgagggcatcacaggggaccaagaagggctgtccttgggggaggcccaggaccacctgtcggggagggggaccgcagtcatttctcattcctcagtgtccaccttgcgacggggatagccacgagtcagcagcttcccggaaagagcaacgtattttaaaaaggaaagtaaagcccacagagggaaatcaagggtttttttgagcaaagggggtcttctgaaggtaacttattatttttttctttccaactgtgtgtcacctatgaccttttctgatggagatgcattttctttttccaagcgtaagcttcctaatgtgctgtgcgtgcttcctacccacccaccccgagcagcctggccgggcaggactggggctccatggggactgtcaccctggccctggaggtgcagccgctggcagcagcctcagcaggctggggtgggaggcaggagaaggcagagctgggaagccctccacccctgcctggctcctgcagtcgctgacttgctctgtcccatgtcccatcctcggctgtcagggctgctgactctgctcagccaacagctagctccctcgctcgcctgctctcttcccctctgttcccacgccagctcctgcccctggaaccagagatgacaggcccagggcagtgaatagcacattcaggaactctagggcacccggacccccccacccacttgcctcctgaggcctcagtggggaggggcaagcaggggtcttccccaaaggcacagatgaagccactagcttcagcctagaaacccggagaagggaacagcctgcggtgggaggaaccaatctgcagcgcagccacccccaaggctggatccttaagtgaaggaccaagccaggcctcagggtgactgtgatcaggactgaggggtggacaaggtggcccaagtatggcttccagaccccgaagccccacgacctcccaggtgcccgccatgatgaccctcaggtggcagtgaccccgtcactgtataagacattttctcctgctgagcagaaggcatcatcccctgcaactacctcttcccacgtctttctcccctggtaccaaaaagaaccctgtacctctcctcctcctcctccctcctgccagtgcagtggccttggtcttggaaactgaagggagaaggtctggcccccagggtggggctctcctttccctcccccagccccgccgtcagcactggccctctgtgaggttcgatacttgaacgccccctgccctgtgccttggacctgggcaaagctaggaggaggaaacagcacaactcacagtttgagctggggggtggtcttggcaaggctcctgtctgtacccctccctaaccttctcaaaagaggtgcacagcctctcgggtgacttggaaactcctggacaaattccattctaacttattttgacatgtatacaaaccaactgtttagagattccacttgtgcaaagccctactgtgtttttatgttcctgtttaaaagagaagtttacttagcaataattataaataaatgaatattctttagtgaggtgactgcaaatgcttctttccccagctcttggggacctggccctcactcccagcaggaactcccagcaaaacttcccagccccacacagcagggctgcactctcccagggcccgggggaggctgagaccatcctctgcactggaatggccccctgcagggccaggcgcctatagccagctgccccgggcccaagagagtggtgtgggccacggcccctgtattcccaccacttgcagagaaaagctgcttcccctccctacccacccacatggcttcaggaaagaagccagctcccgatgccaggctgggcttcagaggctgcgttctgcagagctgccagccccgtgctggtgacaggcaagaagaggcaggaagccttgagcttcctcccaggggctgggcctgctagagccagcagtccacgtttcttcttatagccctgagagtttcagggcattactcaggaaaagcaagcggggggtcaccagtgtggatggagggctagagcccttccaaagccactcagtctaccgcaatggtcgggtttcaggagccataggagtccccccagtatttaggaaagggactttgtaagatggggttttgagagatggggtctcactctgttactcaggctggagtacagtggtgcagtcatagctcactacagcctcaaactcccgggctcaagtgatcctcccaccttggcctcccaaagtgctgggactataggcatgagccaccacacctggccaggactttataaagattatacaactcttctccaggacattttaacaccaaaaagaagaagctttgcagaacttactatgcagaggacagtccttttgattatatgtagctttagagcaacttttatttttcctttttacatggggctaaaaaacttgcatagagcaattttttttttttttttttttttttttttttttgagacagagtcttgctctgtcacccaggctggagtgcagtggtgcagtctcggctcactgcaacctctgcctcccaggttcaagccattttcctgcctcagcctcccgagtagctgggactgcaggtgcgcatcaccacgcctggctaatttttgtattttgagtagagatggggtttcaccatgttggccaggctggtctcgaactcctggcctcaagtgatccacccacctcagcctcccaaagtacagggattataggcgtgcgccactgtgcccggccgagaacaatttgtcacaagcttacttttctagttttgccaatgcatggtgaaagtgaacccaagcctgggaactgcaggcctagacaatgcagggcccttgttcacacacacccaagcccctccaaactcaggcagccttggaaaggagaagtgtgaggcaggtgtgggtaggacctctttttagtacctagaaaaaggctaagaaagtggcctggagatgtttagaaggttaaaaccaacgaagaaaaaaatcaatgacaacctatcaggaactgattgactctcagaatggagaactggacacagaaactggatcatgctagaaaattccagggaacccacaggcctgtgccctgagtgtccgagaactccgcagtgggcccctgtggaatgcgggctcccagggctgcctggtcccttccctgccgtggcagccccttcctgaggtgctctggtctgccccaggggaacctgccagctctagcagggcctctgcctcagggtcccactacctcctcccctcagggacaaacacagcagacaattttgtgaagagctttttagtagctaaatatggcaccatgtgttccaagggcaatataaattacagtatgcaaaacatactgactggctgaggtaaaacgcactgctcctgcctcacgtcaccatgaggggaaacacacatatgcttttaaaaacatctggcttataaaaaaacatcccctagaaaggcctccagagaggggctgtgaggctcaccctctgccgcgctcaggaggacccgccggctcagccctggcccctccactgcagccatgggtggcgcctccccctactgcctgcccagggctctgtccaggttgctcttgatggtgtcgaggaagtccgtggtgttcaggaagtgctcgttcagcttcacactgcagagagagcaccactcacatcaggggtggctccaggccttgccaaggccatcagccaggcccttccagggaacagcctgagcttgggcatcagaacagccatctcctgccacccagactacaggccagaggccagctatagccccctaccatgaggccaccgagattcggcaggcacccgcagggtctgtcttgccaggtaactgctctcctgagagaagctgggaaaggggtgtgggcagggtcggaaggagctctgagtagccagcctcagggatggggaggaactcactagacctggtctacagaggctggcctgagcagtctctcagggctgtggacatgtcctgccccaggcccccttgcagctaagctgactcatgagggggactttaggaggggtcccctggcttcctcccacatggccccagggtctgcctaccaccccaggccacgcacttgctgaggccgtgaatgcagcccgccaggtccttggtcatggctccactctccaccgtctccacgcacaccttctccagcatctgggcaaacctatggggatggggcagaatgagaccccatctgtgcaagggcaggacccagagcctgtcctgggcagctccggcctctccctccatgctcacctgatgaggtcttggttcccatccagcttcccccggtgctccaggccacgtgtccaggcaaagatgctggcgatggggttggtgctggtgggccggccctggggacgggggttgcagggagatcaagagccgagccagctagtgaggaggctgcccagatacagctgcccgcccctgggctggtgggtcaggctcgtccttccagccctcagcccagtgggctttaggcccctggggtagaggggcattgtgaggccccatgccctgcactcaccttctggtgctcccgatagtggcgggtgacggtcccatgagcggcctcagcctcaatcgtcttcccatcagggcagaccaggacggacgtcatcaggccaagggagccaaagcctggagggtagaaagcctttctctcagggcctcgcctctcctggggccacccagctgagccctgctgccctctacaacccaatattgtagctgccatagttcgtggctctactcagcctcccccagctgcaactgggaggacagggactgttccaggtctcttcaccctcctgtgggtctccagggcccagcacagggctggagggcactggagggtggctatcaccagcacattaacatccatctgtgtcaccagctccaggcgccccacagcctgtggcccacagggcccaagaggccacagagtcctgtggtcccccacagcctgccacccagcctggctcgtgacccggaggcacattcaaggaaaacaataaagctgtggtcagctatttcccaacaatcacttttgcagctactctcttaggccactttcaagctttttgattaatttctgaatgctcccaaatccacatgtcaactccagcaagcttttctattgtcaaggactccagggcttcaaaggcacccccatgacaccaaaataaggattgaagaaagaaaacatggacaacatctacaggaaaatgctttgtctatgaattctaagaattttggctgtaagcaatcccttctccattttacctgcaccttcacaccattccttagacacttaaggttcattttcatgcctctgcctcatctgctatggcgtttcatccttctatcctagatgggaattgttcggtgagaggatccccactgaactttccaaagtaaagccaaaggtttacacaaagtaacaagactctgcttttcatcagaacccgtcctgggcttcccttttccccataccaggagctgccctggtaagcttaggtttctctttcactctctatgtcctgcctgtttcccacacctaccacctttcctgctcttgttcccaacacaattggcccatttctcgctgttcttctctaatggtctcacctatactttattttttattttttattttttttggagacggagtttcacccttgttgcccaggctggagtgcaatggcgcaatctcggctcactgcaacctccacctcctgggttcaagagattctcctgcctcagcctctcaagtagctgggattacaggtgtccatgactgtgcccgcctccatgcccagctaaatttttttgcatttttagtagagacggggtttcgtcatgttggccacgctggtctcaaactcctgacctcatcacctatactttttactgcaatctgatttgtcttttaggacaccctagggcttgggggtttgcaggcttccccaacattctcttccatccattaggttcactatgcaaaatgcattcgctgtagtttaaagaacctccagtcccgcttga

SEQ ID NO: 97368 - DNA, 17183 bp, Homo sapiens
  misc_feature (1)...(17183): n = A,T,C or G
gtgcacatttttgttcccttctggcagttaattggtctgtgttttctgcaggtgatttgtgtgggtcagattttctgcactgtggctgctgacaaacatgatcatgccaagcaggccacaaaagtggtgaagattgtgtaccaagacgtggagcctataattgtgaacattcaggtaatgtcaacatctgctcagtcttttggtcatttggcagtgagtcttgctgctgcaggctgtacatcaccacagcttccctccggcccacctgcttcccctccagcccctcttcttatcttcaggtcatgtggacttctgatcctgcctgtccaactcgggatcacttttattttttccctctggatggtgcatagctccctctgactttattttctgccgactcatttatataaggtgctaatgctaatatctaagagggaggagtcttgggtgaccctctgtggcactctagggactgctgagcagaggataatgaggatctcagtgtgaccatcttaattacattttgtaatgcaatctgtcattaataaattttggaaagcgataccaatttatttctccagctggggctttgaaggcatttatagaattttctctagtctgtacccccaaatagataaagaaatatatttttttctggaaattggtggaaatgacaagaaatttattttttggtgaatgaagcttttgctttttatgtgtgatctgtgtaaccttctgaggatcttctggccatttgtataaatgaaaaatctggccactaaaggtaataatgaaggaatcacagaaatgacaaactccagagggttttaaattcccaaattactcagagaaaatccaacgaatagctgtggatgaccactcagaaactgagggttaggcacaaaaataaccacaaataatgctctatcttgacttctaaaacagagtgatggcaaaggagctccttaaacatacagattgcttcctagctgcctggtttattatgaaaaagtaagaaatccatggcttcctgctctttcctgggtggttctactctttgtctcttacttgtgtagtcaaggggatcacagttgtccctgaaacatcccacaaacctgaacttgagatctcaaatcacttaaagctgtgatcctggttttgttttctccccagatctggctgcccaatccattttattctagaacatggggacaacatgttgataactggaggatggcacccactacctgggacatataaggtgagcaaataggaaagccgctacatgcagcacaaattcagtgattcgctaacttgccgtttcaaatatctgcggggtcctatgctcacccacatgtgattgctgtacttttttattaagttttagcactgcactttgtgactgtcaaatcactgcccatagaagatatgggaacatttatgtagaggttgaaaggccgaaagcaagacagaagtgtgggcagaggcctcagcatttgaagatctccccatttctgggggcatccagaatacaaacatgttaaagatttggagtgatgcttgttcaaacttgattcatcctatatagtctcaatctagctatagaaagctcccacttcgctgaagaagattttctgaaagcttcagccctgtggaatataacctggaatctagaagggagcagaacatactgcttagaacctaaaataaggatcacaaagctccagcactaaaccccaggggtttcagttcataagagaccttttgttctcatacagagctttatcaactctaactcacaagcatggacaatttctcactccactgtttgattagaatcaaatccctgctcagatatcatcttctctaggagacctccccaacacagccctggcttcttatagaattgagtttgttccgtcagcaccacaattacagagtacttcccaagtgccaggtgctatccatctctgcctcccgggtgcctggtgcagccttctagccttgaacatctcattctgctctgccagatgactggtgtcttatgtgggaaggttcctttctttgcatttctattttcctagatcttgcacataaaaggtgctcaataaatacatgctgaaatgaagtgtgcaacaaccaacacactctaaaggagtcagagggtccagcaggaagagggtcacataagcctgctttccttggagtggtctttcattcaacagataaaacatctgtgctgggacctttaacagaatctaccagagagtatcaattgagccagccagagcagtgaggggattgagaaccatgtcattaaaactcagagtgcttggtctgaagaagaaaagagctcatgtgcagtgtgggccagtctcacctgacagagaggaaggactgcatacgtggatgcctaaaacatgcaagacacagtgactggttaactcaggatggaatcccccacccctcccatctcactcctgtcccctccctgcatgtctaggctgggggtctctatgttggatttcactccctccccctcaccctttgacagctcctgctgccacaccagagccccctgacaccaagccctggcggcagccccatcttcacctttctgatgcttgattaggcagcccagacccccactcctgcccagaatgctgcccctcctcaaatttctgaaaagctgtggaaagagggagtagagccattcactgctctgatgggaggcacagctagaaaagaagatacaataggaaggtgggattccacattgtgtgggagctggccaacactggaacgcctggcttccagatgccgttcctgccaacaggaagggatgccctaggcagctttcaaattgttttaccatggcccataaaatgcaccttatgatgggacccagcacatgtgcatgaacatacatacacacacacacacacacagagagatagagagagacaagagagagaaggggagagagggagagagagagagatagacacagagagagagagagagggagagagggggagaaaggaacgaaattacacaggatgacacttatttggctacatgtcatgcactgacactttctctgcactgctttcctctcccttcctttcctcctcccttctcttctatttattcttttaaatatgctggtcctaaatgaattttcacaccttactagtgaatcacaaaggaatggtttgaaaagcactgagcaagatggtatttctatagcggtggccacagaacaccggcatcagagccttggagatgcttggttaaaatgcagactcctgagcctcacccagacctcctgaagctgaaaaactggaaacatatatatgtatttttttttgagtggggagaaatctacagacaacaacaataaatcacgagcagaaatgttgatgtcttctctgtaattccactgtggttttgtaggaaggaccaagcaatctgagcttatttttctagaagttgtagagcaatttcaaggaaattacagaggaagacccaatacccacagaaattgtttcaccttctcattcatgtaacaatgcattcacccatccatcatccatccacccatccatccatcattccatccatccatctatccatcattccatccaaacattatgctaggaggaataaagagaggaataaagaaatggctaagacaggtgtagtttacagcctgcagtgaggaaccctaaagggaaatcaacaatttcaacatagtgcaactgtactgagttaagaatcaggagtggatggtgcagtgtaggtattggaggtcagggaagccatccagaagtaatgcttaaggatcacacagaagcatgataagagatgttaaatgggattgtgacttaagacagtcctcaaaatgatctgtacattagaactgtggtgttttaaatatcagttttccttgtggactttctttgttatcagtaattcttcatcaaccaatagcaccatagctgctagagaaaaagaaatgaaattgctaaaccagcagcaaaacctctggaattactaagttattttctaaaaattggtatcaatagatcttggtaaatttttttcagccttacaagcatttctgaaaattacctgatgataaaacatctttggatatccaactgagattttcttgggtataatgacagttcctctttccttccaataattccacgggttaaattgttctacagtttttttcctgctgtagtatgaagagtttttcatacatttctccagcatcttatcagttcctttggatcaaattcttgcttgtgaattgtcttatcaagcattttgcacatgtttatctctaacctggtggacgaaaatgccaaacttcacaagatccacagtgagtccatagtagacactagctgtggaatattgtagaatcatcaggaaagaacactttgagaataaattaagcatttaagagacaatgcaattttcagaattgaaagactgttcttttatttatttaaagcctttttttttgatgaccagttacttttaggatgggacagggcagaccagtgggcaggggtactttcattctccatcgtgtacctttctaaaatgtttgattttttttaagtatacaccatgttcatttttccccctatgaaatctttgaggccagatataatttgggattctaaatgtttctgattttagaagatcatacgacctctatactatttattaaagtcctcagcagagtctggggcaacatgccacattcaagcatagtaatatttctgcagtgaagtgtatgattacttaaaccaagtaagattttttaaagactatgaatctctcattggatgagatcaggagaagtttctccaccaaataggtgctcagggtttttgaaattcagaattgcaggtgacagactggggccttatattagcactattcaacttttcttataataaccaagggtgtgagagcaataagattatggacaaatgagattttgttttttatattttgctgtattttattcgataattctttgcaagatttttactccccagaagcaattgagaataatatgttcagaggaacaaggagaaagaattcacgaggacagagtgttcctccccaaatgacaactaagggcaaagcgggtccgctccaacgaaaacaagctccaaattctactagttgttaacaatttaggccaatttgctactgctttgcagagttggaactgcagagagaggcactgtccttattgaattcaaccttacactaggagagactcagaaaggaggacaatgccagcgggccttcaaagtctaaccagttaatgccactgaaaatggcgagaggccgctgcaacagctgatgaccacatttcaacagtaagggactcgtttaggcttttctttgtttcacagatttcatggcacagcaccttagctattctcaggtggcacacacctttggatgaaaccattggtcctgtaccagtgaaactgtagctttattttgtggcttttgctacttcatttgtgactgccttactgtcaaaaattcacatacagatggcagaaagaacagatttctaattttatttccaggctgctgctctagttcatatctacacagatgggtctgtattagttggtcatggcagagctgaattgggacaaggtattaacaccaaaatgacacaggtgaaagaggttgtttcagttttgccatcagccagaattggactttataaaatactcccagactgcacacacctcccagacattgcatcacacctttgggctttgtgatgcaatgactagaattacccacagcgtccctaggagctcattctgaattatctggaaataagccagctggaacttgggaagagggcttcacctcccttctctagtgggaggggcttcaccaaaactcagcttcccagggaaccagtgactcctcacccttgactggagcagctgtaacttttcatgggctccacagttcagtgaggggtggcagcattcccagacaactcctgtgtattaattatacatatatttgagtgccaattgcaccccaaatccagacttcctggtgccagacaacttgttcattccccaatcaagtccactttctcatgcttactctatgaaaagggcacccatgatagggtcggggtcccccctctagaatgcagacccacactgggacccaagacctccttacttgagaacagagatctccccaggctgccctcttggaagaacagagggcagaagccttactgagccaaatgtcctggtatctggagaagggcaagcgcaacatctcattttgagaggggacaagtggagatatccctggtttggtcagctgaacttgaagaccaaagccaagagtaactcattcaatgctggttactcagtgacccaggttccaagcaagtctctcacaaagctttaatgagtacctgcccctagagtaaagtaatgaagacaataccnagtgctgtatgggtcatgcctcacttaacaacagggatatgatctgagaaatacatctttaggcgattttgccattgtagggacatcatagagtacattttcataaatctagatggtatggcctaccacacacttaggctatayggtctagcctattgttcctaggctctaaacctgtgcagcatattactacactgaatgctgtaggcaatgataacataacggtaagtatttatgtacccaaatatatctaaacatagaaaaggtacagtaaaaacctggtataaaagataaaaaatggtacacctgtataagactaaaagttgctctggctgggtcagtaagtagtgagtggatgtgaagacctagtacactagtctagactttataaacactgcacacttaggctacactacatttattttaaaaatatttaggtctggtgtggtggcttacacctgtaatcccagcactctgggaggctgatgcaggctgatcacttgagtccaggagttcaagaccaktttcagcaacaaggggaaaccctgtctctacagaagaaaatatgaaaattagccaggcatggtggcatacacctgtagttccagctgcttgggaggctgagttaggaggatcacctgagcctgggaggtggaggtttcagtgagccaagatcatgccactgacctctagcttgggcaacagagccagaccttgtctcgaaaaaataaagttaaattaaaaaataaagtaattatgccacaacactatgacagctatgatgtcactaggcaataggaatttttcagctccattataatcttttgggaccactgtcatatatgtggtccactgttgactaaaacatcattatgccacacatgaatgtatttaaaacaacccttcaaagtaggtattactgcccatataattcaaacaaaaatactttggagagcaaagggagccattggcattaatacaaagacaaccagtgtaaacagggattgtcctgggcaaagcaggctatgtggtcacctggttctggtatctccaggtcacagacaagatccccacggcatggagagtataagtcatccacatactgagaagaagcagagctattcaatcacagggatgtctgactctaaaactcacatatctctacacaccacgctgcctttctctgtgcctgtgttcttgtgttcactgcctggacaggggttttcatagccttgctaagtatgcagcaaatcctaagtggaacctcaacacgtaaaacacatagaaacagagccattttggttgaactgggcaaatggatcttgcattctatctgtcctccctctagcctccacttttacctcctgggtgaaaaagccccaccttggcactggttccacagggaaaaccagagtcagccccttgtccagaggtggagacaagccacatggaaggtatctgcaggatgcaggaaggatggtgattgttgcagggtgagaaacacagttgagtttgaaatgtttccccatttaattatctgccagtcttctgtccttttccacctgcagaatacctgccggaccctcgtggaatgccttgaacctattatcagatggagtactagtggcacctgggagaagtgggtgagtatcaggtgtggctgaagcctgcagagctcctgtggggccactgagtggaagcacctgttcccaggtaggctgcatccctgccacttcctcctcctgtcctgtacaacctagggcatcccctccccagtcatcagtgagcaggcagatcacctgggcatcagttaaaatgcagattcttattctgtaggtctgagtggggcctcagagtctgcatttctgtcagcctcccaggtaacgctggcactgctgaaccacgctttaagtagcactcctggcttttggatataaaatggatagtatctccatcataaggaggtgactaggagctaggaagaaaggcattcatatattggtccagaaattaaagattagtaagctgagttcataagggacagatataaatcagtcattcaccttgcaaccagatcttacgaaacagaaatctctggttcatctggctatttactcacacctggagaaatagctcagtaacagtgttaaagccattcatatttaaataccacttagtgtgtgtctggttattcgctaaggaagatagagcctacatcatctaaagttcacttttggaaatttgcagagaaaaaagcaatacatttaaaggaagttcttgcaggagaagctgttatattggattacattttgaaaaacatctttagttaaagctacaaatgcttgctattttccatacctgcatttcaaacattcctggggaaaactggatagtctttgggtggtagttcttgttcttctttcagaataaagacttcattttaaaacatgacccagatttttaaaaattgaggcagcagaagttctgcaaggcccctgagtatttaattagtgctgttagaaagtctcctggtgattttgaagttttgtgggaagccctcagggagcggcgatggatgggatgcggtagcagtaacttgagggattaccaaacttgcctcctttatctcttagtttctctgaaacttaaaaatatatacatattccaaccaagccgaagctccacccagactgtttccccatatatggagacaggaggatggagatccttggttagacttkgtttgggaaccctgaatttaaacttccaccacagatgtttaccttcatcgctttttcctttgctctttaaatagatccaccaaagcagtgacttagcaatyatcctgggcatccttagcaatcatcctgggcagagaacccacttgggcactctgcttgttcactcaggaaaataacattcccaacaataaggaaaactatgacatctagaaaatggttattttcccatgttttgcttttgtccagctgtgtatttttcctttcatcatattcttttttgcaggctaatgaagcttttgctcaaagcactagtttgtctgccactgsatattttaggtaagaggtatctaatactgtcctaaaattattcccctttagaatggaaaaggaactttgaaaaggtgtgctcagttgtttatatttttaatattgtctattattatcaattttatttttttattgaaaggttttcattagaaagagaaatgttatattatcagaacaggaaggcagacaattttgagatgagtcccataatttccttcctgcaatgccttagtacacataaacctgccacaggtttataggttgatattaaatgatcctgtgaatagtgagaacagatcaagatagagggatttttgcaaagcttttagtgcttcccagcatggatttagtgcttatgcctttcagtcttagtgtctaataggatgcagcactttgggctttctaatatttcttgctctccagaaatcttgccttatatcctgcctcttgtgaccctcttctcttgtctartgggggattggttataaaagctgtgagtcaaaccagggatgaccaaaacagccccatacaaatagcatgggaagttgagcaaggtaccccatcagacatgagaatttgtccaaataaggaacagggagatctcactggaagtgacaagaaactaaccatccttttaccatattgagcatatgtgggcacatcgcctaggcttattgggagggcggtctagtatcctgatggcatctataaatacaaagctcacatctgaaggtaggttggatcttcttgaatggggaggccatgcctagtttcagtaacccagaggaaggacgtgaatttaggaaactagaactgagggagctcagattctgttggtctcacaggtcaaccatggaagtcacaggcacccctggccagtgggtataaataatagtaaccatcatgagaaggtagaccaggaaccaggaagaacccatttattggttcaacaattgaagagaagtaagctgagttgtaaagatcaatgaaattgtctctttttcttgtccttttgtttcctcctgtcatttatccaattcttatatgaacattcttactctgatcagtcggtctacagagaatcaacccaagagtcctccgtccagtataagaaaaagagagggaaacagtgccccgttagaccaatgtgtcaatggtaggatcagacatagatcccaaaggaagtgagtcttgggtgaaagccaaggccgtatggaccacccagtgccaactctgaggttctgaactttatttttactaagaaaagkgcaatttcctcacagcactaggcaaaaatggaaagctatcctggcacacaagtatagaatgccaccagagacaagcagctggaagaaaaagccaggccaccagcaacagagacaaagaactgtgagcttgagaggctatggcagatggtgagggaaggacagtgagggagaaagagactcagatgcagcagaggctcagtggctagacttaggacccagccagggcttattgyaaaataagcacttggtaactttttatatctttgccttggcaaccaggaaactcaaagttaaattttatgcttcatttagttttggcttttgttgttgttgttgttcttgttgttgtttgcagagacagagtctagctctgtcgcccaggctggagtgcagtggtgcgatcttggctcactgcaacctctggctcccaggttcaaacaattctcctgcctcagcctcccgagtagctgggactacaggcgcatgccgccacccccatttaatttattttgtattttagtagaggcggggtttcaccgtgttgcccaggctggtctcgaacttctgagctcaggcaatccacccacctcggcctcccaaaatgttaggattacaggcatgagccaccgcacctggccagtttttatcatatataaattcctactctcttattattcatttcatctcatttcttgactctcatcttttacacttattttaatgatttgactattgtatttgtatttaatatgaatgctttctataaatagactcatgtaaggcttgtttaggaaataagtgaaattgaattaaatacgtatgtctaacatgaatctattaagtttctcagcagatgaaaaagaccttccttataacaacacttgtcatacctgaagaacattatttagccagttcttaatcttctctttaccagaattgatcacaaaaattttaactcatttttagcttttgaaacaatgacaagtttacagaaaatttgcatgtacagtacaaagaattttttttaccctgaatcatttgagagtaaattgctgacctaatgccccaaacccctgaacacttaagagtttagtcctacacactatacaatatacccatcagaatccagaaattaacagcagttcacaactactatctaattatcagactccattcaagattcgccggttgtcccaatcaagtattttatagcaaaaatattcaatacagaatctcacttttcatttagttgtcctgtctctgaggtgtcctggagcaggaatcaggtctcccctctctctttgacatcatgactttgacacttcggaagagtttggccagttatcttgtccaatgtctcccattttgagtttgtctattgttttgtcgtggttagatcgatgttatgagtctttgtcagaatattacaaaagtgactctgtgttcccctcatggcatcctgccaggtgacacatgacttcgacatgtcccacttggttaagatggtgtctaccaggactctccacagtgaggtggtttttctccttctgtagttaataaatattctgtggggagatactttgaaactacgtaaatatattgttcctcattaaactttctgtttattttttattattattattattttttgagacagactcttgctctgtcgccaggctggagtgcagtggtgcaatctcagctcactgcaacctccacctcccagattcaagcaattctcctgcgtcagcctcccgagtagctgggactacaggtgtgcgccaccacgcccagctaatttttgtatttttagtagagacagggtttcaccatgttggccaggatggtctcgatctcttgacctcgtgatccacccgcctcagcctcccaaagtgctgggattacaggcgtgagccactgcgcctggccaacactctttttgttactgccattctacccctcaggtccaccccacagcctgtccaattagctatgtgagttaactgctcagtttggtctctgcaaagcagagctaaaacaaacaatgcgccttcctttagggctcttaaaattaaagcatgagtaccctctagtggcttgcaggaaagtttccacgattctcgaacttttcctaagtcccagatgagtgaaggacactggcaggggtgggatgtactggagccagatgtgttccccaccagcacacccaggaaatacatttttgcacagctgtaattttgacttaaacatttgtttaaggtttgcatgctcaatcatatgacctacatgtttggctcagtatacatttgttttctcaaaatctttagtatagtgagtgctccagaaagtcattgcatgtttacctcatagacccatgaactctgaaaagcatagagttccactgaaatgccctttctgagaatcaaagttgaagttcttttcacttgcattggaagaaacctagattttgtgaccagagatggaataaaatatgaatagaaccacattaagtagaatgttctcagtatagcctggcagaaggtgtgtcgtgcctagcatgaggtgacatggtgatgtgtgcaatggaaatggagttatttggcttcaaactgtgtttgaactcttatgaggattcaggcaatagagcagacagggatacttcaatccccactggggttgaactgcccttttccctctgtgtcaaataagaggtggtgatgctggtctatgtgatgcttctgaccttaataataattatgtttttttgtttctggtttctcctccactaataaggctctgggtcttctccttagggagaaggaattgtatgactgaaaaaaaaaaaaaaaaaaaaaaaagcttgattttcctagtactcctgcaacgataaggcaggccaggaccttccagaagttaaaaaacaggctccattgaaacctgtgataaggaagcaacagaccatcactgatgggtctgggatgaaattagatcccctgttacagagtacattttaggagacgctaaaacagaaacagggtgagaactccaggctgagacattccagcggggagggatagtttagatttgtttagcataaggataacaaggagcagctcatggttcccttatcaactaaattagctgagattactgaggcagcggggtgttgcatgagtatgctggcaaggtgggggaggtgtcatgccaagtacattcttaatattgataaaatacagctatgtaggagggtgaaatattctcaaagattagtcaacaagagataaatcaaagcccaacctgataaaaacagactaactgcaattagaaccagcccagctagtaatgtcaaatcactctacgttagtgtttcattctgcaaaccccgggtgtgaaggattaattttaaaaggctgcctaactcatctcctgggggtttgggtgactacttcactttttaagactgatttgaaccctttcatccttactgaagaaaaaccctgaagctcatgctaatatcctgccaatactcacaacttatggctccaaagttggttgaaattttgaattatttccttgccagttagcaaatagcattacttcgatcgctagatgctctcccattacttccctggacccttcccaggagcccccaacttcctcatacccagtaacgctcaacataaatggctggggcagctccttacatgggccaattgaccagtgcccctcacaaaactgattgttgaagattttgagtatcgggtgcaaaacctgaaatccaagcattacagattttagacaacaacctggggaattgaatgacctttgccttattgtaatgccattcgatttatcccccttaatcacaaagcaactttgcatagcttcaccacaatcagtcaggaggaggtcatggaaaattctggtaaggtctgccacctgcaagtttttgctgtcattccttctctctagcctctatttccttgtgtctgtcaaaagaagaatgtggaccagcccaggagatctcactctggctgtgtaaaaacaccttgaagccttttaaaaatctgcagagatccaggctgggcgcagtggctcacgcctgtaatctcagcactttgggaggccaaggcaggaagatcacttgaggtcaggagttcgagaccagcctagccaacatggtgaaacaccgtctctattaaaaatacaaaattaggctgcgcaggtggctcacgcctgtaatcccagcactttgggaggccgaggtgggaggatcacctgaggtcaggagttcgagatcagcctgaccaatatggagaaaccccgtctttactaaaaatacaaaattagccagacatggtggcgcatgcctgtaatcccagctacttaggaggctgaggaaggagaatcgcttgaacctgggaggcggaggttgaggtgagccaagatcacgccattgcactccagtctgggcaacaagagcgaaactctgtctaaaaaaaaaaaaaattagccagggctatggcaggtgcctgtaatcccagctacttgggaggctgtggcatgagaattgcttaaacctgggagatggaggttgcagtgagccaagattgcaccactgcactccagcctgggcaataagtaagactctgtctcaaaaaaaaaaaaaaaaaaaaaggcagcagagattctaattgaattgatctgggagtggggcatctgtgctgtttttgagttcccagcgactctctgtgagccaatgtggatactcactgcactggccaaacactgaggtcctggtgccatgattacaattcagctgctcctcttatgtcaccagtaaaaacaagttgctttccaggactgacaataggcgctggctgcagcctggcccagatgcaggacatcttggctgagagggtagctgagctcccagaggagaaaacacagacgtactgagccctcctgaagcacctgaggagtctggcaggccagcagatccggaatatggcggtatgttccctggtttcaaccactgggcacaccgcacctatttctgaacctcactgaaatgttgagatatgcgttggcagaatcagtatgcaaaaaggtctcagcagattgaagcaacaggcgcagtaaatgtttaaaattaataagcattatttaataaaaatatttaagaaacaactataggctgggagcagtggctcacgcctgtaatcccagcactttgggagaccaaggcgggtggatctcttgaagtcaggagctcgagaccagcctggccaacatggtgaaacctgtctctactaaaaatacaaaaaatagctgggcatggtggtgcacgtctgtaattccagctacttgggaggctgaggtgggaggattgcttgaacccaggaggtagatgttgcagtgagcagagatcatggcactgcactccagtctgggcaacagagcaagactttatctcaaaaaaaaaaaaaaaaaagaaaagaaaagaagaagaggaagaacgataagtcaagctcaaaagagtggctaagcagcatcacaggtgagaaaaggatgctatggttttgctagtttcatgataagcttgtccaagaacttagtttagtcttaggctgcattaacaaaatagagtatctaaaacaaggagggtagccttctctactctgggctgttcaaaacacagctggagaaagatggtcagatctgggaggcatacttgaagatctggttgattttgatctcaaaagaaaggaaaagagaaacagttaggtttttgaaacacatatgctccttcccctgcataccctcaattgtatagcagaaatctttgggatatggaaaaccagggagggcatgtttcctttaaaacagctctcaagtgatttcaaaatgttctctctccagtcaggaactctgacgaggtacactggtgaggagaaggtggcaggagaatgaggggttggaaaccaccccaaaaagaggactaggggtgggaggacaggcaaagggaacatgagagctgccttggactatgtctagactcctgaggtctgatgtgttattacatatgagcagagagtagaagagtaactgacagatgaggatccagggagccagatttcagctcaggggaaacaaaaaaaaatgtaaaatggaactgctcataaaggaatggggattccctgtcctcacctgtgttccagtccagaccgcagcaaccaggaggtcaccgtagattccttccctatgctgggaggagaatcttgagttcaatggccagtcatttccctccc

SEQ ID NO: 97369 - DNA, 14971 bp, Homo sapiens
tagtgaataagtctcatgagatctgatgggtttatcaggggtttctgcttttgcttcttcttccttctctcttgcctccaccatgcaagaagtgccttttgccctccaccatgattgtgagaccttccccagccacgtggaactgtaagtccaattaaacctctttcttttgtaaattgcccagtctggggtatctctttatcagcagtgtgaaaacggactaatacaatgtgtgtcttaggaaagggttcccagaggaaagaacgtttctgcccaggcctgaataggaactggaatgggatgggagaggcaggtgcctcgggagcagggacagtggggacggatggcagaatgtcaagtgcagcgtgcctaaagaacgccaagtgcagtgtgcctaaagggtctacccaggagggcacagcaccctgagacgctagaaaagcaagcagtccatgccacagggggctgcaattttactctaagaataaaagggagcaaccagtggtgaggtggtttaaagtggaattggattttggagacctctctcgaggctggactggagatggggaagtcctctcacgaagcaggaccagttaagaggctgctgtggagctccagggaagtgatgacggcactgcccaggagcccactcacctgacaggatggagccatctctcaggcccctaagatcaccctcgccaatttcaccagtagctgttccaaggggcaggctgggaatgcactacagaccacaaagacatggatacgacagcctcatttaccacctctaggccagactgcctgagtctgaacccagctctgccccctatggcttcttaacctctgttcctcaataccctcctttataaaatggggatgacaatggtaccaaacactgagggctgtggtgaacattacattagttagtatatataacatgtctacaatagatgagaataaagtgagtaggaaagcacttatttctttttgtcatatctatgttttgtagcatgtgggttcatttgtgggggcagggagtgaatttactgtgaaaagcagaatataaagcagctcattaataatttacatagtgtgcagctgtgttattaggtgcataagagtttagaaatggaaactttttgggaaattgaaactttgatctacctgtttcttttcaatttttaaaatgtagttactagaaaatataaaattggacaagtggctcaggttatgtttccactggacagtggtgatctagacgaaggatgagcaagaagcccacatcagtccccaagtcctgggtgacaacaactggactgcagaaagtgacaagcaaagagaggagagtatcagaggccatacttgtcctactcttttctgctagagtatagattagagatgagaataagatgtttatgaaaagcaaaaagggggtgaagaacagggcagaagaggataaaaacacagaggctgaggaggagagaggaaggctgaggaagaaacgacacgtgtaacagaaaaactgcccctgctcagaactcaatacacataagctctgaattatgaaaaagagatggtcttaaaaacagccttaacagtcaaaagacagaagtactattccaccaaagcagacctttctaatctgttattttaatcaaactgatcctatcctatcacatgatacttaactgttataatcccagatgttaaaaattgaaggaaaaaaggaaagaattcatgggtacaggacttggtgaaccatccaataacttaatcctgaacatttttccatgctgtaataacgggacaacaaaaatgtcttacatggcctcaaaaacccaaataagaaatgggcttttcctctaggtcacggataatttttagcagaaatgcagagaaagcaggccacagaagtagacataaagtataggaagtgcagtattatgagagctcagagaggagtggtttgtttgcagcaacaagggtgggagttgagaccaagccaggcagtttcaccagagaaacacttcccttaggtcagaggctcttggggagctaagggttcctcacagctcaccttgccctgctgcctgacccactgggagactggggcctataggtgaccacacttgctggcaccatacacagccaggtagaaactgatcctgactgccagaaggactcctgattccttccccagtctccttagaactgtggccctcatcagcgaacagtgaggaactaccagtgtgatcatttcaaaactggaataaggtcgggcgcggtggctcacgcctgtaatcccagcactttgggaggccgaggtgggcggatcacgaggtcaggaaatcgagaccatcctggctaacacagtgaaaccctgtctctactaaaaatacaaaaaattagccgggcgaggtggcaggcgcctgtagtcccagctactcgggaagctgaggcagaatggcgtgaaccccggaggcggagcctgcagtgaactgagatcgtgccactgcactccagcctgggcgacggcgagactctgtctcaaaaaaaaaaaaaagaaaaaaaaaactggagtaaaatagctgtgcctgtggctcctaaaacagcaataccatgcctaggtatggacctatcagaaatgcagacacatatgtaccaaagccagacactagagtggtcacagcggcactttctgtaacagacaaatgctgcaaactgcccaaatgtccactaacaatgcgtgactatgtggtatattcacccaatggcccctatcaccaatgagagtgaacatgcttcaaccatgggcagcatcatgagtgattctcagaaactcaatgcttaaggaaagaaggcatacactagccagccaggcgcaactgctcacgcctgtaatctcagcgctttgggagggcaatgtgggagaatagtttgaggctaggagttgccagagaccagcctggacaacacagtgggagccgtctctacaaaataaaataaaacaaattagctgggtctggtggtgtgtgcccgtagtctcagctactgaggaggctaaggcaggaggattgcttgactccaggagttcaaggctgatcctgggggaggccgtgactggagtacaacacaaggggagctcccagggtcccggccagttctgtttgttgatctaagtgctgagtgcatgggcatgttcagtctggaaaattcattgagcaggacacttatggtatgtctactttcctagtatctatgctatacttaaaaaaaaaagaggaaaaaaaagttttgtctgtctggtgtccaggtaagacaagcctggtagtgtccttgaagcctcaaagctgatttttctcctgctcccttacgcatttcacttgcttctcctctgcacgtgtgcttaagctggctgtctcccgggcgagcctgcgtgtcaccgtcatatttatggtttcctcccacaccaggcctgtgattcaccccactttggatgcctttgctaacttatgccacccacactgatccagcccttgcttttccttcctcagcagttaggcagcttggagcatcattaacatgtgtatattcccagttgttttacttctgccagagcttcccagcagactaaaaccacggagcatgcccttcgggagtgatctcagtcctccatcgtgtccacaggcagtgcggattaaatcgctcctcaggagccaggagggtgtggaaggtgagctttatcccttctcccagaaactgctggctccaagacacccacctcagccctccaggacctggaatggactcccacagaggactcaccaacctcttttcattcattgcctcccgaggccaacctgctagataaattcccctcattgctgcaaatagtcccacaaggcaagcagggaagaactagaggagcaaaccaaagaacaaagagtgtgttcttattctgccacggatatatccttaacgttcatcaccaatctattttgataacatgcaacaatttacaatttatgccaaaattataagaactgtccaaatagtcgtaaatgtgagctctcaaaatttctgcctgtcagccctctctcttccatgagccccttcatgccttcctatctcacctgtttcttttctcgcctagacgaagaaatgctgatcataacccagaatatccaagggtcatttcatcttacaaaaacagcagcatccatataacaggcacatgggtaaaagactcaagacatgctggttatatgctctcgcagttcgtatgaatctctccttctccaagtgacagctggaattcaggtgcttctaggctctgttactagcaatgttagacactcctcgaagctgtcaagctctcaggattacacaagtgaaaccacaacctgtcctgactgtattcaagtctgtgccccttcatgcagcagaaatggattcctcttccacagtttcagcagctgtatccttccgtggaaaaggattagcagccataagcccgggggagggcagctaaacaccagagggcaggagatgagtctccttcctctctgtgacacccagcacggccctgccacgaggagcaggcaaccactggtgccagatgaagcgcagcacataaaaccattttccccttcaaatgaacgatgcctaattaagcaaaagccgcatgcatgacttaagacatgaggatataaaattcgtcttccgagtcagctagagattctgcaggatcctctaccctcgtaaacgtatttttttatgattagaaaaacccggggcctggaagggacctcggccatcggcagggtaagcttctcaggagagaccatgagcccgagccccacagggggatcagtgtctgccaaggtcaccaagcgggtgtgaggcaagggcagggctcctcggggatgctctcggaaaaccctgcgttacttacacacgcaaggcgtacaatgaatgcacacccgcgtcaagccacggcttacaattcagaagaaatcaaaaggtcgccaaaacctgtcttctccgcaaggctggctgcagagagggtgcagggaaggtcaccggcaaatttctaccagcggccccacatcacgcctccccgatggatgcagagagaggtttcaggagctgctagtaaccttgcagggggttccctaagcccatcccaggaaaacgagttaactcggctctgctaactccgaagcttccagcaatgaattaaatcccgagctgcagcggaaagcggcggggaaagggccactgcggcgggacccgacacccggcggtccgccccaccctctaccgcgtacacacctgcgtgggaccccccgcccggtccacacggcccgggaccacgaccctccgcccgcgccccagccgggctcgcctgagggtgtcgtgccctgggcgctgcccgcggggttcgaggcggaaacgccgcgcccagccggcccgggaagagacaagtcgccgccgcagcccccagcccgcgggcccccgcgacgccgaggagggggctgcgccacgtacctcggccggcaggtgccgccgctgcctcggtccgcggctgcaggggacgccgctccgcgcagcccgccgccttcgtccgcatactaatgagggggcgccggccggccgccagcccggtaccccgcgcccccacccgcccccagcgccgctctcgcgcccattcagctgggggccgccgctcccccgctcagatgcggaggaggggcgcgtgggcggggtctgacgtcacgaggacgcggacggccaatcggagagcacgatgcctccgcggcggcccccgcccccgggcgcgcggccagtcagccctgcggtgcggtgggcattgccagagcagggcgccccctgcagggacgcacccggggcgggggccaggctggggcgagccccccttggttctggagaggaaatgacatacagtttgtgaaagcataaatattcgtgaaaataagaaaattcaggaaggaaacaaagcttaaggcagtgattgataggttatttcttggacacagctgaacgtatactgtgcgcctgcaactttccggtggtttcggaccggacttcagtgaagccagtgaagtcggtcgacttgcagaacttcctttcagaggggcgtacacagcaccgcggccgtgtgcctgtgatctccttctgagtttgaaaaagaagatcctagacaccgagccaaatatgtttgcataaaccgggagacttgtggctctattttgtaacagcttggcgcagggcagctggtttggagatgtctctgttcttcccttggtgggggtgccggaaaaaatgtgctgcctgggcgatcgaggttggggcaaaagcgttgcaaaggaaaaggtgggaggactctactttcacatttcccaaaagagttttaccataagactatttctggattgttctaacgtgaggatattgggagcattttgaaaatactggaggaaaagctgtcactgggcgatttaaatccggtaagttggccaaggcagagcagctgctggggtcagcgacagctgacccttgcagctgagtatcttgccctcttaatcttggagatcagcccaaggcccatgtgttacaggaaaggggtcccgatctagaccccaagagagggttcttcgatstcacgcaagaaacaattcagagtaagtccacagtgcaaagtaaaagcaagtttattaagaaagtaaagtggtggctgggcacagtggctcacgcgtaatcccagcactttgggaggctgagacggacagatcacctgatgtcaggagttcaagaccagctggccaacatggcaaaaccccgtctctactagaaatacaaatattggccgggcgtggtggcgcaagcctgttgtctcagctactcacggggctgaggcaggagaatcgcttgaacccgggaggcagaggctacagtgagccgagatcgccactgcactccagcagggcattcctgaaaataagaggagggacatatccaactaaggtacaatgcttgtaatgcttgtatatatgggcagatgtcttctgctacaaggstttgtgataaaggattaattttccctaattactatattttgcaataatcaatattattatttttaaagcaaaattaggaatgcctttgttctccagatatcgggatatctggactctctcaagtctgggtctgtttagtaagcattattaatttgttytcttaaccataaacacctagaggctaggaatgcctagctttcaggaaatgcagcctagcaagtcccagcctcatttttctagccctcactcaaaatggaggcgctctggtttgaacacttctgacacatgtgcttgatgcaacactctttacctctctttgtctcccctgtccttccccttctcttccagattccccttgtcggcaaagccaggcgctgatagcgttatggctgccatgagagtcagcagtatcccagcttccaaggatgggtgtaaggtgggggtgaggaagaaaaggaactygaagctgcctcctgtcccagaatcacaagacatctgttaagcccttactacctcattcactccactcacattaggttgacccacttgggcagcaagacaagcaggcctgcaaacttccttttcttcatcagccacagagacatcctcagctattattctggattaaggcagagatctccaaacagcagactaagatcagcctctagatctcaaagccttactgttatctctccaagtcagtggctgatctcagagaagcttctgaatagtgactagcaaagagtcactcaggctacttacaaatccaggacagcagcgtttttttttttttcttttttagagacagattcactctgtcatccaagctggagtgcagtggcacgatcttggctcactgcaacctccacctcctgggctcaagcaatcctcctacctcagcctcccaagtagctggaactacaggtacccaacaccatgccaggctaatttctaattttttgtagagacagcagtctccctctgttgcccaggctggcctcaaactcctaggctcaagtgttcctcctgcctgggcctcccaaagtgctgggatcacagatgtgagccactgcatgcagccaaaaccagttattttttggctgggcatggtggctcgcacctgtgatcccagcactttgggaagccgaggtgggcagattacttgaggtcaggagtttgagaccagcctggacaacatggtgaaaccctgtctctgctaaaagtacaaaaaattagctgggcatggtggcatgtgcctgtaatcccagctactcaggaggctgaggcaggaaaattgcttgaacccaggaggcagaggttgcagtgagccgagatcacgctagtgcactctagcctgggtgacagagcgaaactctgtctaaaaaaaagaagttattttttatcaatatatattaacatgcaatggatttattattattattattttatttatttattttttacttgagacagagtcttgctctgccacccaggctggagtgcaatggtacaatcatggctcactgcaacctccacctcccaggttcaggtgattctcctgccttagcctccagaagtagctgggattacaggcacgtaccaccatgcccagctaatatttgtatttttagtacagatggggtttcaccatgttggccaggctggtcaagaactccggacctcaggtgatmcaccctcctcagcctcccaaagtgctgggattataggtgtgaaccacaatgcccagccagatttattattttaatgacttaataaatattttaaaatttaaatatttaaattaaattaaatatttaaaaatttctcagttttaatttttaatttggcaaatatcaagagaaagaccatgtcaaaaagattctttgggatcctcagtaatttctaggtgtgtaaattgatcctgagaccagagtttgagacttactggtctcagccacccagatagccccattgccccatcctccttgccactaggaatggttcatgggtagccacaggaaccacactgatccaatcagaggaagtctcaggaatttattggatgctgggggagagatgctttcatgttctgctagacaagaactaggcagtaagtagcctcagaagctgttggtaagacagacatcttggactacaagaagagcttattttaggaagaaagtaatgctgtgggaagcagaagaccacggttagaaagaaaccatttcctttatgacatttttgagtcactaaatcaaaccagtcctgaagtccatcttgcctccgtacatttcacctgtatgagatagtaagttcctctgtggtttcaactagccaaccccagatgccccaactgattcgctatgtacctacttatgcaacacaagttgcaatgatgaaatgaggctggaaggcagagaagggtccaggaggaaagtacctagctcaggcaaatgggatcttcagcggcatatgatcgtaagcagcaagattatagcagatttttacttcttatttttatttttgcttttctgtatttcccatattggtcaacatgcatatgtattgcttttacactgaggaaaaattagaacctatattattactttttttgatagtgcaatgactggcagcgcaatattagagaacaggttggggaatgggatatggcaatagaactcttaggctagaactgctagcagggaagaaagaagatttgcaagggatgcagatgggccccaaaaccaaacttactttcatttacagctttgccaagagccaacctcagagattccaggggatgaacaagaatccccaaaggttaagaaatcattaattatgcctcagtctaattggctggaatatttgcagggagaaaaatgtggccaacgtgaagatcatatgtcaatactggaaaagacttaggatataatattaagtgaaaaaaattaaaaaggcaacacatcgtatgcaaacatctatcatgtggccaaaaactggaagagaacttggaaaaagaaaatagttgtgttagggtggtgggatcacaagtaatctttcttcctttttaacaaatctgttttaatgttgttataatgttgttttttgcaataagtaaaaatgtagggagtcattggttcaaattactgaggtctcaaagaggtctctccagacggcctgtttctttttgcctgccaaatggccctcatcccatgccatgacagaagctgtgccttccctgagggcccagtgtctttgaaactgttaggggtgatgctgatgtgactgatttgtaggtggccagaaggaaaggcgggaagaaagatgttggtggcagccaagaccgaggaagtctgtgaggcaggaggggtgaggggtcccttgccctgtgacataaccttgtcgtgttggagtttcaggcccaggttacttactgaagcattgtctttttatgttggacttctgtctggtccccctgagacgttgtctcttccgcaggccctcgggggctggagcacagctgtagccaacagaacacaggctctgtctgctgccctgaagcacaaaggaagttggtctcttgaggtttttctaggaatgttttcctgtgagcaatcacaggagaagcgggagtaaaacaaacaaaggagggaaaaagatgacacaaaaacatcatgggaaggctggcggttggcagaggaggctcagattgaggaaacaatccctcatggaatgaattcttctgttagtggagtgatgcatattgacagatccaggcacatcttcaggctgcccttctgtctgtccctcacccatatattcattctacaaatatttgctgagagcctattatgtgtgaggcatcatgctaagtgcataacataaattacttcattttatcttcacagtgtccctttaaggtagggtctcttatccccatatcttacccaaggaacccgaggcttagagaaacttaaggagataaaacaacctgcccagggtcacaaagtcaggattcaaacccaggatgtcagagtccagagcctgttaccagtagagggtcctgacaaatcagtagtcgtccaggttcttggcgttttgaacaaagaattggacaaaatgcacaaacaaagcaacaaaagaatgaaggaaagaaagcgcagatttattgaaatgaaagtatactccacagagtaggaatggcccgagtgaatggttcaagagggctggttacagaattttctggggtttaaataccctctagaggtttcccactggttacttggttataccctatgtaaacaaaggagtgaaccgtgaccagtctgattggttgcgggaggggaccagtcagaggtactttccatttttcatctgtgatgcagtgcaaagggagtggcctctgatccttttgttacttgggtatggagaggtggggtttcccatctgattcaattttaggaagtcagtgcaaatcagccttaggttccctgcctccagaccttattctcttgcctcaagcctacctaagtgatagggtttggctgtgtccccacccaaacctcatcttgaattgtagctcccataattcctacatgttgtgggagggacccagtgggagataattaaatcatgggggcagtttcctccagactgttcttgtggtagtgaagaagtctcatgtgatctgatggttttataaggggaaacccctttcgctcagttctcattctctcttgtctgccgccatgtaagatgtgcctttcaccttccactgtgattgtgaggcctccccgccacatggaactgtgagtccattaaacctctttttctttataaattacccagtcatgggtatgtctttatcagcagcatgaaaacagactaatacactaagacatagtcctcaccctgaaggatcaaatggtctaacagaagagaaagacacttctaacaaacaaacaaacaaaaaccagtaaaacaacaagataagagaaaaactactaacaaggagccaaaggcagggtgcagtggctcactcttgcaatctcagccctttgggaggccaaggtgggaggatcgcttgaccctgagtttgagactagcctgggtaatatagtgagacctcatctctacaaaaaaatttaaaaaattagctggatgtggtagcttgcacatgtggtccctgctacttgggaggctgaggcaggagggttgcttgaggagtttgaggctgcagtgagccatgatcaaaccactgcactctagcctgggtgacagagtgagaccctgtcctcccacccccaaaaaaagagccctaggagcatcaagggggcacagcagaatccgtcttggagctcaaggccacctcttaaaggggtgagactggttttgaaggataaggtaggtatactgataggcatattagtttcaggctatacttattttgtttctgtgtaatacattaccacaaattagattaaaacgacacatctttattatctcacagtttaagtcaggtacagtatagctggattctccacccaggggctcacatgactgaaattgttaccaaaatagggctttggtctaagtcccactactcccagcacagaaagccaatcactgagacaataagtattgtcagtgaagaaggctttagtctgttgctacagccaaggagataggagaacagtttcaaatctatttccctgacctactaaaattaggggtttaggccaggtgcagtggctcatgcctgtaatccccgcactttgagaggccgaggcaggcagatcacctgaggtcagaagttcaagaccagcctggccaatgtggcgaaaccctgtctctactaaaaatacaaaaattagctgggcatgatggcatgtgcctttagtctcagctacttaggaggctgaggcaggagaatcgcttgaacccaggaggtggaggtttcagtgagccgagattgtgccattgcgctccagcctgagtgacaagagcgaaattccatttcaaaataaataaatagataaaaataaataaataaataaaattaggggtttaaataccaaggaagaaatgtaaccacggctgtgaaaataggaattaggaaggagtaaggaagaggagttggtcaacagtaagcaagtggtcttctggcagatgaggagtctggcatctcattgtccagattcagtgatatgtaagtttctgttccttgatactacctggaaggcccgatggtttccagagaaaggaacccagataacaaaaatgtaatttctcaagtttcaagacttgaggggtcaatttccatgtttattcaaaagaaacaataaatatcagttctatgggacaattgggccagttttcaaaatcaagatggtggggctgggtacagtggctcacgcctgtaatcccagcacttttggaggtggaggcgggccaatagcttgagcccaggagttcgagaccagcctggacaacatggtgagaccccgtctctacaaaaaatacaaaaattaaccaggcatggtgacacatgcctggtccagctacttggaaggctgaggtgggtggatcacctgagacctggaggtcaaggctacagtgatccatgctcatgccactgcactccagcctaggtgacagagcaagacccctttctcaaaggaaaaaaagaaatcaatcaaggtggtggtcagggctgcatttcctatctgggctcagggtcctcatccaagatcattgctttgtggcagaatttatttccttacagttataataggattgaggtcctcattttcttgctagctgttggccagagaccctcccccctcagctcctagggtggccccataggaagttccttgccatgtggtcccatgggaagttcgtggtgtggacacttgctttcttccagggcagccagagcacagctctatcaatttctcttctgctgccattcagacaaaactctctgcttttaaaaggcccatgtgattagggcaggcctgcctagatcatctccttattttaaggtcaacagatttgggaccttaattacatccgcaaaagctctccgcagcaacacttagattcatgtttgaatgactgaaagtgtgcatatcccgagagccaggaatattgggagctatcttagaattctgcccaccataatatgatttagcaaatggagaagatgaggaagggttgtctaggaagaagaaataggatatgcaaaggattctggggaactactggaaaatgatgctagaaaagtgagtgccatgtctctagcaacatggcaaaccagattctggagaaatctgccaactcaaaacccctaagatactggggaaactattaaaacatgttttgtagcaaggctgggctggcaggaatgggaggaaactcctctgaggtcgaacaatgagaaagtgttaatcccgagaggtgagcaggagccagcacttgccctgaagccacctgctaatactggccaagcagcaggctggagataggagacaaaatctagactggagcagagggtgaaatcagattggaaatccttatgcacaccagagccctcaaagggtggaaatttcagcaagggtggttggacttttctccccaaaggaaacaaaggaatgcttgccatagatagacaatttgccttaagatacctcattttagctcagagtggaaccaaaacaaagacaaaagtttcccctaagaattcctaaccaaaagcccacattcatgcatttgggacaggaattcataccacctttgtgagtaaaaaccttcaagccaaacattattttaaagtggtcccaggttggtaattcccttagacacttgta

SEQ ID NO: 97370 - DNA, 13541 bp, Homo sapiens
accaactatctgtgatcaaggctaaatgccagagaagaaaatctaatcgctgcaggggaagagaagtcactatattggaaatgaacacttccaagacaaagaaacactggtttcaattaagacacaaatgctgggaaaagaaaagtcagtgcaggctgctgcagtggctcacgcctgtaatctcagcactttgggaggttgaggcaggaggatcacttgagctcaagaatttgacaacagccagggcaacacagagataccccatcactagaaaattttttttaatggccaggcgtggtggtgtgtgcctgtggtcagagctactagggaggctgaagtgggggatcccatgggccccggagggagatcttgtctctaaatcaataaataagtaaataaccccaaaaataaaaaaaaattaaaaagtcaatgcataacataactggtacatataccgagtctctaagagaataactcattagtggtaccatcttataaatgagaaaaaaaatgcaggaaggtgaggaacgttccgggatcactgtgagagacagctactgctgcccaaagagccactgtctttgcctactttgcagcctctgttgcagttgggttagagacttgtgactagcctggtcaacagactgtgagtggaactaatgtgtgtcacttcctgggtgaggcagtgaataggtaacgtcctccttcagttctctcttctcctcccacaatgaccctgggggtcagatgttgagttagcggcaccacagaatggaagaagcctagattttgactcacagctttgagaaatgtccccataaaccctcatcagactatgcatggatgagaaaaaacttaatgactccagccatgagatctgaggaactgcttgttgctacaccagtctgtcctatacaggtaagtacagttactgagattgtgtcagagctgagattacaaggccaggtgggactctgactctgaggggttgttcgtgtaatgattatacctgatgcaaaaaaaaaaaaaaaaagaataaaaaagaaaaaagaaactagctataacatactttttattattaatttttttgagatggagtttcactcttgttgcccaggctggagtgcaatggtgcgatcttagctcactgcaacttctgcctctgggttcaagtgattctcctgcctcagcctcccaagtagctgggattataggcatgcgccatcatgccaggctaattttgtatttttagtagagatggagtttcttcatgttggtcaggctggtttcaaattcccgacctcaggtgatccgccagtctcagcctcccaaagtgctgggattataggcgtgagccaccgtgcccaccctagtttttatttttttatttttatttttatgtttttgagacagagtctcactctcttgcccaggctggagtgcaattgcatgatctcggctcactgcaacctctgactcccaggttcaagcaattctcaagcctcagtctcctgagtagctgggattacaggcgtgcgccaccatgcctggctaatttttgtatttttttgtagaaacagggttttggcatgttggccaggctggtctccaactcctgatgtcaagtgatccgtccgcctcagcctcccaaagtgcccggccaattataacatactttaaaaaataactggatgaagagttacatactaaagggaactagctatttagtcctctaaattatagctaccttataggaagtcacatgatgctagcagaaaaggattagtttcaggtaaaacaggaaaatacagttgctgtttcacaataggaaaatataaaacataaagtattttaccactatagaagggaacagatgtctgtagttattaccctgtgtaaagccagattggtatgtaccataaattcaggctaaaaagtgcctattagagattgaaagtctcaggaacacaagctccatgtctttggaagactaaaaatatgcttaattctaagatacaactctgattagaggcagaattaataggatataaggttaatttatggtcatggagagaaaaatgggtaaaaatacctgctgcaataagctcttctagaatgttcctgaaagataacgtggtaggcagaattctacaaattctctcccctcaagatttcccaccctaatccctggatgaataggatgaaatataacatccacaaatatgttatattacatggtaaaagggactttgcagatgtaattatggttattaaccagttgacctgaagataggatattattttagataatctgggtggccctaatcaaatgacgtagtcttctaaaacaaacttgtcttagctagcagcagcagaagtcagagatacaaagcacaagaggaattcaatgcattgttgctggctttgatgaagtgggggtcacatcccaaggaatgtggatggcatttaggagctgagaaaagaccctggtttacagtgaggaattaaacagggatctcagttctacaacttcaagaaactgaattcagccaacagtctgaatgatcttggaagtgggttcttccaataagagtctagactggatgacttaggagatcttaaacagagaacaaagcatcaacagaaaactaatacaataataattcagcttaaatacttctgcttaagtactttcaacgactgagtgctcgtaactttacaggaatgttttttctttccattggaagctctaaagatttgaatgatctcaaactaagtcatccgcaagcctgcaaattttgttcctcagttcttggtattcttctcaaatgcaaatctgaaaacatctgaagacagctatcattttgtcagatacaaatctcaagttcctcatcatcttaagaatgcaaaattacctgtctcttaaaatgtggtgcctggaactgaaagcaatacctcaaaagtggtctgactagaagtgtctgctttgaaatctgactccttttgatctgaaatctacatctattaattaaacaaagttactatatttttttaaaagtgtaactcaatcttttttctttcttttttttttagacagagtctcgctctgttgccaggctggagtacagtggtatgatctcagctccctgcaacctctgcctcttgggttcatgagattctcctgcctcagcctcctgagtagctgggactacagatgcgcgccatcacgcccagctaatttttgtatttttagtagagacagggtttcaccatgttggctaggatggtctcgatctcttgacctcgtgatccgcccgcctcagcctcccaaagtgttgggattacaggcatgagccaccacacccaaccctataactcaatcttgattaacactgagcttgaggtgaactacaacttccagatttttttttttttcacatgaatggctaaaaattcctgtcttctttactctgtaaccatgctgttgattttcttttctttttctttattctttttgttttacttagatgtagactccaaatgcatcagatccttgtaaaatttccccttttgtttttggaccattattaaacctgcgtagatagttcgcaacctaactctgacttcccacagtttgaccattccttcttgcttgatgactccattaatttgatgaggatgccttctgtatctccatctacatcacggataaagacgttgagaaggatgggtaaaggataatgccctctgggtatccctttcacttggacatttgctaattattcaactagctgcaaattcaccttcatcttactccctatacaatgacctggcctatgtttctaaatcttttctacaggaatccagatccatccatttagatagtctttttttttagaggaacctaccaagagttatagaagttgatgtctctctctctctctcttttttttttaaacacctattgcctagatcagggataaagaatacattctggccaagcacggtagctcacaccaataatcccagcactttgggaggccgaggccggtggatcacttgatgtcaggagttcaagaccaggctggccaatatgatgaaaccccatctttaccgaaaatacaaaaattagccaggcatggtggctcacgcctgtagtcccagccacttggaaggcagaggcaggagaatcgcttgaacccgagaggcagaggttgcagtaagccgagattgcaccactacactccaacctgggtaacagggcgagactgtctcaaaacaaaacaaagaaaattctgaattgtcaactccaaactagtggctacctagagtgttgtattgagaaggatcttatgacctgactatagcaggaaaaatttctggggttgattaattatgtctgccagaaaatagagtgtgccacatgtttgccagtctgtctatatagtcagattacaaatatcttaccgtagcttcctatacctggttgacagattcctaatccattaagggcaggggaatgttgacggaccaggagaaaccaaggcccagggtattaagtcaaacgcaagctgtttatgtcaaaagcagatagatggtaatctctcaaaactccttatcaccttgcctcaacttctcattggctctccactgtgccacacaccctcatcttcctacaagctataggtttaaaggaatcttaaattccaaccagggaaagatgagtttctggcagcctcatttggaatttgaatgaacgttcctgtgggtcggctccttaacaacctatgctgaatgaaggaataatcattagaaatattgttagccatggcagaagttaagtttcttaatacaggaccaatcttcacttacatgaaccagttaaataggtcctgaagactgacctgggcatcctgatcatttgtgacacagtttctacaggaaaatgagttgggagtcgcatttagaaacacactggaaggagctgaacctttgtctgaaagttaagcacccgcgccacccaacttgcacaatttgttcatatttccaagagtataaattttatcctccttgttaattatatgtgccttctgcttattatatgcctacaggtcacaggaacctcaagtatttcacagaatgatgccaaggagcgcagtttctacaccatccctcccgatcagaccacatctattccaatctcagtctcaaactcttcccctttttcaactcacattaatgaattcactaagtacctagcactgagaataaaaagctaaagcagcatccgtcttctctactctcacacagcttacagtccacagcaaagcgcaagtcatcaaacacacgcgctccacctgccacccctaaagcccaggcgcatcacgctcggctccacctcttcatctagccccgccccttcctgcaggccacacccctttctctatcaggctcctccctttatgccataagccttttttcctcatctagctcttccccttcctccgccagttcctaccgtgccacaaagacgcctgcccttctttcaaactatcccattcagaaaagcgttctggattgcccgttcgaattcctccccgtcctccgtctacccacccttaaagggttccgctcccaacggatcctcctcaggccccgcccctccccagaccccgcccgctctggggaagccccggcacatagtgcctctgcctttcgctccctctcgcttcctttcgaacgaggcagggactctcgctctgtcgcctttggagtggtcccgggccttgccccaggggtggagaaatggccgctcacacctacctgtggggccaagcggatggaaggccccgagacagctagtcccggcctactggcaagagctactcaggtcgctgccggatgggccgttgccttgggttacgaccacgctgggggcgggaccgcggcggaagtgacgtagcccaacaaagcctagcactggcgaggcggttcgtggcatctcctatccgctccgggcgctgccgccggaagggccagcgacggagggtctcagatggcggggcttgaggcccacccgggctctcgggtcggcgagtcccgttggggagcccttgtgcctgctaggatatttagcagatgccaggcggccagaaacgtcctcacttttctccctcggccctctggggaaccgccgtgagcgtttcccacggacacaaacttaacaggcccagaacgtccagggaggacgcgttgtgagcctcaaagagcccacttacgtgaccgacagcaccaggccgacgggcactcgctgaactgctggcccggagcagcacagctcttaagtgggcagtggcatcttttatacaaataaaggaaggtggccccacgtccctaaaacaacagcttgctgaagagagatcgcaaagcatcccccactccagctcgggtctgactccaaagcccttctgctttagaaagtgtgactatttctgctgtagaaaaccggtatctaggccaggcgcggtggctcacgcctgtaatcccagcacttgggaggccgaggtgggtgtatcacctgagatcaggagttcgaaactagcctggacaacatggcgaaaccgtgtctctactaaaaatacaaaaattcgccgggtgtggtggcgggcgcctgtaatctcagctatttgggaaactgaggcaggagactggctcgaacccgggtggcggaggttgcagtgagctgtgatggcaccactgcactccagcctggagagcaaaactcaagtctcaaaaaaaawtttggtatctaagttctctagcactgtgattgctccaatgagacggattcagctataattctattccaacttttttcatacgtgtaagcttaggtaccttgttcacataaataggaagatgcaaataaaaggggttttattgtatctcaagctagtaagtattaaccaaaaacatttaaatgttttatcagttgacaatttgttttggtcttccttcagatctattgaaaacagctgggcaccgtggctcacacctggaatcccagctgaggcaggaggctcccttgagcccaggagttgaaggttgcagtaagctatgattgtgtcactgcactccagcctgggaaacagtgcaagaccttgcatattagaaaaaagtttctgggaagtataccaaaagtcttaactaagatttgctmaatgaatattaattaaataacctaacggcaagtacatggggaagttggaggatctagaacctgacttccttcacactaactattcctgcatttagcaggtaaaagcccgatagcatgattgagtggaaacatgaagggacaagggtttggctagttatgtttataaaaagtcaacataggaattgagtcaagataccagaaactctacttatagtaagatcccactttgcaaaaacggagaatggaagcgtacagaactgtaccttctcctcaattttgctgtgactgtaaacttcctctaacacataaaatgtattttaaagaaaaaaagccaggagtggtggcttgcgtctgtaataccagttactcacaggagaggctaaggcaggagaatcacttgagaccagcttgggaagtgtcacaagaccccatatctattttttaaaattaaagggagatgggtgggtgcggtggctcacacctgtaatcccagcactttgggaggctgaggcgggtcaatcacttgaggtcagaagttcaagaccagcccagccaacatggcgaaaccccatttcaaaaccctaatacaaaaattagccgggtgtggtgatggacgcctgtaatcccagctactcaggaggctgaggtgggagaatcacctgaacccgtgaggtggaggttgcagtgagccaagatcgcaccattgcactccagcctgggcggcaggaaaggcctgttgcagggaagaaagaggaatttaatcctggtgtaaagaaaggcacctctttaagtatgggaaggaaggtgtgatttggtctgaaagaacacagtaaaaaagacacgcttgtagttagcataattttttaaactgtgctctttttagtagccccagaaaaactatagaaattggaaaaattcagcagctgggcgcggtggctcacgcctgtaatcccagcactttgggaggccgaggcggatggatcacgaggtcaggagatcgagaccatcctggctaactcagtgaaaggccgtctctactaaaaatgcaaaaaattagccgggcgaggtggcaggcgcctgtagtcccagctactcgggaggctgaggcaggagaatggcgtgaacccgggaggcggagcttgcagtgagccgagatcgcgccactgcactccagcctgggcgacagagccagaccccatctcaaaaaaaaaaaaaaaaaaaaaaagaaaaagaatagaaattgaaaaaattcagaaattctgatttgctgaggaactgatctgaatggccagcctcattttcatagtagtatgcccatgcagagctccctagtggtttattaaaacctaaaactggccaggcgcggtggctcacacctgtaatcccagcactttgggaggccgaggcgggtggatcatctgaggtcaggagtttgagaccagcctggccaacatgtcgaaaccccatctttactaaaaatacaaaaattagctgggcatggtcgtggtccgggtgcctgtattcccagctaccctggaggctgaggcaggagaattgcctgaatccgggaggtggagggcctgggcaaaagagcgagactccgtctcaaacaaaacaaaaaacaaaacaaaacctaaagctaacgacaaaactacctgggaggtgatagcagaaaaaaaatttaacacttgcagggtaacctattcagtttctcaagttttagttactagaaagctttcttcaaaacttctattaatctgctctactaatgccaaaaccattcaaaaggaatatgaggtcatgaaaattaaattccctggattcagtcaatttggagggccattcaaagcctgtatttttggcagcactgtgacatcaatgacagtggatttggctctgtgttctaaatagtggaagagcaagttgccaaatgttctgctctttgaaaaaagaggggttgttacagagcaagttatgtgtgtctttggcaggaaaagggaaaaataaaaaactgcccaccttcttcagagactataaccactcacggactttcatactctagaatggccacttttgcttcccacctttatttagaacattcaacctccccctcttccctgagattcccattaaaatttttttttttttttttgagacggagtctcgctctgttgcccaggctggagtgcatggcatcatcttggctcactgcaggctccgcatgtggggttcatgccattcttctgcctcagcctcccaagtacctgggactacaggcgcccgccaccatgcccggctaatttttttgtattttgagtagagacggggtttcaccgtgttagccaggatggtctcgatctcctgacctcgtgatccgcctgcctcggcctcccaaagtgctgggattacaagcgtgagccaccgcgcctgtcccatttaaatatttttatagtaaaatttgctaagggactgattaagagtagaccaggaaatatgaaaatcattaccacgaccacccaactatttaacaaatttcttatcctatcacctttcatacctgtgaaatgatggtagtaatcgatgtgtctagagaactttcaaaactaaagggtaaatctatgtaattattactcatccccatctattttcaaagcagacagatcaattaacatgattgacaattacgcaatatagacaatcatccaggataccttggatacttttttttttttgagatgcgttctcactgtcactcaggctggagtacagtggtgtgatcttggctcactgcagccttgacctcccagacacaaagtgattctacctgactcccaaatagctgggaccagaggcacatgccaccatgccaggctaatttttatatttttgtagagacggggtttcaccatgttgcccaggctggtctcaaactcctgggctcaagagatccacccaccttagcctcccaaagtggtaggattacaggcgtgagccaccacacctggccaatacttaagatttaagggtacaaagatatagttcagcagtgatatggctactggcagaggcttggaatgaagtttcttcagctgaggagcaggaaagatttgtatgttatttacctacctacttttgctaagtccttatatttgctgtttattcaccaccagaaggtggtactatatgaatacttctcttttcctctagtaactgagaaaatgatacaggagtttatctcctcttgctctgtgtgtatgtatatatatatttgcatgtgcatatagaccccccaccccaatattatcagcatattacagttggttagcgtatgctgtgtattagctacttggaaataacttttggcactctaaatatgcttaagctgcaaagaatactatcagagtccattatctgagctcataaagcttcagtccttgtccacttttattcccatgacttaagtggaaacctgaacgtggtttaacaacttaaaaacaccatgtgctatactgatcaaaacttccaccttcctctgtctttcctcttctttcttcagacctcgcatgatagaaaatcaaagttggtgatttattttttattatgttaaaggtgacagatcttggcttaagaaaaaccagatttgtgactaaagaaaacattttcttggagctttgcattgttctggcttaaatttccttttaaaaagtaactttccgtaagttaaagttagcactttcacaaatactagcagagttactaaatgaaatattaacatcaaaacaaacatgattaacgaagaagtattttattattttgctgcaaagctgttgcttcactgtataaaaatagcaccagcaaatgcagtgtatcgcaaaattaagatagtggtgttcctcatctgacactgtacaagcaacaaaacctcttcacttccagttatttccaatggaaagatcattaagtatttcatcccaaatccaggtatggatacatgcaagttacaatattatataaggcttaagaataacaatgttatctttgaattatgtaatttttataactagtttttaccatggataatttcatgaattctgaacactagagcctagtctaaaaatcataggatattgtgaaaaagacgcatattatatttatctataatcattagaaagttaaagggcattttctttcattagcagtgttaacagtagtttttttttccccatcggtaatactaaaagtttctattctaagtcttctatccaccactaatttaagacaactctgctggcttgcgttatttcatactagtttatttaggagttccattttcactcctcaatagattttatgtatttctcatatgcttcttcactcataagttcatctagttctgaagggttactcagtgtcatcttgatcagccaacctgcaaccaaaagacaaccttatattccacattaactttttaaaaagtcaaattcatccaaaacgtaaaataaatttctgagcgcctcaatcttgtattctttacaaaaaccatacattatttgttcatagaactttaaattttagccttaagaattaaaatacttgtatataacaaatgaaaataattatggctagaatagattccaccataataaattaagaactcttaggttgtaataagcatcagaaaatgacatttaaatctttaagggccgggcacggtggctcatgcctgtaatcccagtactttgggaagcgaaggcaagcaaatcacttgaggctaggagctctagaccagcctggccaacatagtggaaccccatctctaccaaaaccacaaaaattagctgggcgtggtggcagttgcccttgatcccagctactgggaagctgaggcagaagaagtgcttgaacccgagaaggggaggttgcagtgcaccgagatcacgccactgcactccagcctgggcgacagagggagactctgtctcaaaaaaataataaaaataagtccttaaatatatgatccaaatacacaagaccaggtatgtctttaacaaatggaacactaactactgaggttaacgggattagaaagcagtagtaattagaagggctaggtgacagacaaaagagaactacaacctaatcctagctttgccatttatcagccatgagaccctgacagataaatcctttggagcctctattcatctacaaaatagagaaaattgctgttagcttacctgattagattataagggtgaaaatgtgagaaaaccaaaaattaatgcaaaatatatatttttttacctcccatgtcacacaatatgagtggctgctttatgtctgaaaaagtaaatactttgcagatgtttacaccaaaaccaaagaatctacaactgatatcaagaacctgcaaaataaggtaatgcttttatcatcagagatttttttttctttttttgagaaggtctcgctctgtcactcaggctggagtggagtggtgcgatcttggctcactatagactgcagccttgacctcccaggttcaagcaattctcccacctcagcctccctagtaactgagactacaggcacattccaccacagccagctaatttttgtatttctatagagacagagtttcaccatgttgcccaggctggtctccaactcctggactaaagcaatccacccaccttggcctcccaaagtgctgggatcacaggcgcgagccactgcgcctagccagaaatcttaaacataactttaagtattcaactaacctctgtttttcttttaaagcagaacatctctatttagtaccaagaagtagaaaaagatgaagtcacaatcagctaaacttgctttaaattctagataaaatatttactgtagtagtaattccttgagaaatttctagcaacagcttaccatcttcataacaagatttgtttacaagtcctggattttctgcaagagcttcattaatttcagttacttctcctgataaaggagaatagagttcactagcagctttcacactttccaaagcaccaaactcatctaagtggaaaaaaaattaaagaaaacatgaaatgttaaaagtcagttacttgaaaacataaaatacgaaaaagtagattcctgtcatatagctatgattttaaaattccaaatttcttttttttttttttttgagatggagtctcgctctgttgcccaggctggagtgcagtggcgcaatctcacgtcactgcaagctccacctcccaagggttcatgccattctcctgcctcagcctcccgagtagctgggactacaggc

SEQ ID NO: 97371 - DNA, 25177 bp, Homo sapiens
tggtggcaggcgcctgtagtcccacctacttgggagactgatgcaatagaatcacttgaacctgggaggcagaggttgcagtgagctgagatcctgccacagcactccagcctggatgacagagcaagactctgtctccaaaaaaaaaaaaaaaaaaaaaattgctgggcgcggtggctcacgcctgtaatcccagcactttgggaggccaaggcaggtggatcatgagatcaggagttcaagactagcctggccaacatggtgaaaacccatctctactaaaaatataaaattagccgggtgtggtggcgcatgcctgtaattacagctactcgggaggctgaggcaggagaatcgcttgaactggaggcagaggttgcagtgagctgagattgcgccactgcactccaggactaggcaacaagagcgaaactctgtccctggcaaaaaaaagaaagaaaaggaaggaaggaaggaaaggaaggaaaggaaagaaaggaagaaagaagaggaaaaaagaaggggcaggaggggaaactggtacaaaaatagaagattctcttgagtgaaagggaaaagatggggaggaagatgaagaacacacgcaggatcgttcttttgaacttgtgacacctgttggggaagtttacttaaaactaagtctcgtgcctatccagaaaacctctccacaagggcagaaaagaaagaaaactacctaactatctatttgtctgtctatgtagagagagggtctggctctgttgccctggctggagtgcagtagtgcagtcccagattactgcagcctcaacctccccagggtcaagtgatcctcctacctcagcctcccgagtagctgagactataggcatgtgtcaccacatccagctaatttttgtactttttgtagagatgaggctttgtctttttctttctttttttttttttttttttgagacggagtcttgctctgttgcccaggctggagtacagtggtgacttctctgctcactgcatcctccgcctcctgggtttaagagatttgcagcttatttttatatttgtagtacagacagggttttcaccatgttggccaggctggtctcgagctcctgacctcaagtgatttgtctgccttggtctcccaaagtactgagattacaggcgtcagccaccatgcccagcccgttttcgtgattttgcccaggctgttctctaactcctgggctcaagtgattgtcacgcctcagcctcccaaagtgttgtagaggtatgagtcaccacgctcagcaatttttaaaattatttatttattttattgttgtttttttttttttttagacagattctttctctgtcaccaagttggagtgcaatggcacgatgtcggctcactttaacctccgcctccagggttcaagcgattctcctgcctcagcctcctgagtagctgggactgcaggcacctgccaccacgcccggctaatttttgtatttttaatagagacagggtttcgccgtgttggccaggatggtctggatctcctgaccttgtgatctgccagccacagcctcccaaagtgctgggattacaggcgtgagccaccgtgcccagcctaaattatttatttttaattgtgggaaatatacgtaacataaaatttaccattttaaccacttttaagtgtttagtggcattaggtccactcatatcattgtgcaagtgccactaccgtccatctccagaaggatgaactctttccatgttgcaaactacagccagctgggttcggtggctcacacttgtaatcccagcactttgggaagcagaggcgggcagatcacctgaggtcaggagtttgagactagcctggccaacaaaatgaaaccccttctctactaaaaatacaaaaattagctgggtgtggtggcacacgtctgtaatcccagctactcagggggctgaagcagaagaattgcttgaacccgggaggcagaggttgcattgagctgagatggggcccgctgcactccagcctgagcaacagagggagactccatctcaaaaaaaaaaaaaaaaaaagaatttcctggggtttaaataccttctagaggtttccattggttaatcggtgtatgtcctatgtaaatgaagaggttaaagtgaagttacaaagtcatttactcggggtacaccctatgtgaatgaagaggatatttcctgtcatagctgaagtgtttccatttgatttagttcttaggttccctgcctccaggccctattatcccgcctcaatgggtctgtgcacaaggttggggagaggcctgggcactctgtgcatgggggccagagctggggaagcctcctgccagagggccctccgggatggggagggagcagccctgtggggcgggggcagtcacggccgcaacttcacgctccttttccagggcaagcgcatgaggaaagagacgtggggctatttctgcagcaagtggaaccttctggagctggccatcatcctggccagctggagcgccctggcggtgtttgtgaagagggctgtcctggccgaaagggacctccagcgctgccggaaccacagggaggagtcagtggctgtctcctcagccccccagctccccacactggcccctcttcctacagctccgtttgaggcccaggggtcagaaggaggttttggaatgctgtggaccctcaggggataaaggggcactcctagtagacataactctagctgccacctagattcaggtgtggggccagccgcaagtgagtacgattggagaggactcagacaaaatagaacatcttgtgcaaatcttcccaaaacataggaccatggggcatcctgcttaggctctccaaaaccttgcaaaggggaggccctttgcaagtattatggccccagtaagctcacctctgctaccatacactaagtgtccactatgtggtaggcaggatgttttcacctagggaatcatcatcaggattgatgaaggtcagtgttatcatcgccccatttaacaaagacattgagggcagggtgtggtggctcatgcctgtaatctcagcacttcgggaggccgaggtgggcagatcacttgaggttaggagattgaaaccagcctggccaacacagtgaaaccctaactctactaaaaatggaaaaattgctggacacggtggctcacgcctgtaatcccaacactttgggaggccaaggcgggtggatcatttgaggtcaggagttcgagaccagcctggccaatatggtgaaaccccatccctactaaaaatacaaaaattagctgggcgtgatggcatgcacctgcagtcccagctactcaggaggcgggagaatcgctagaacccgggaagcaaaagttgcagtgagccgagattgcgccactgccctccagcctgggtgacagagggagactgggtctcaaaaaaacagacaaagacactgaggctcagagaggtcacgtgacttccccaaggccacacagctaaaatgtggcagacaagtaatttaagcctagcttgtgtggctccagggtcccctcccttgcttggaatcattgggtttcttgactcactcattcgttttatagatatagctaacatgtattgagttattgctaaatgtcatacactttcataaaaacaccacattacaagcagtgtctcatctcacctacacctgaatcctcctgagacctctaagagatgatatcaccatccctttttttgttttgttttttgagacggactcttgcatgatctcagctcactgcaacctctccctcctgggttcaagtcatcctcctgcctcagcctccccagtagctgggattacaagtacacaccaccacacccggttaatttttgtatttttaatagagacggggtttcaccatgttggccaggctgatctcaaactcctgacttcatgattcgcccccctcgacttcccaaagtgctgagattactggcgtgagccaccgcgcccagcctcatcatccttttttttttacaaatgaggaaatcacatgtaatgaggcttggagaggttaagctgcatgaagggaaaataaaatcttgggaccccaatccactctgccaaaaggaaaaagaaaaattaagctgaaagttgagtcatgcaagaaactgcctttcattttgttcgtaaagagagagttacagctaaaaggttgatctctgcaggcagcagctccatgttcaccttatcttatgtgaagtgcccacttaactgagcatgagacaaatacatcattgactattcccttacctgctccttttctctggcaacatgtggattcaatagtgtcaccagaccctccctctttcctctctagaccgcttttctcttttaagtattgaaggcttcgggctgggcatggtggctcatgcctaataaaagagggcttatggcctcttttatttatgttttgagacgggatcttgctctgtcacccaggctggagtacaatggtgtgatcacagctcacgatagccttgatctccagggctcatgcgatcctctcacctcagcctcctgtgtagctgggaccacaggctcacgctaccatgctcagataattttcttttttttttgagatggagtctcactctgtcgcccaggctggagtgcagtggcaccatcttgggtcaccgcaacctccgcctcccaggttgaagcgattctcctccctcagtctcctgtgtagctggattacaggcgcacgccactacgcccggctaatttttgtatttttagtagagatggggttttaccatgttggccaggctggtctcgaactcctgacctcgtgatttgcccaccttggcctcccaaagtgctgggattacaggcatgagccactgcgcccggccgctcaggtaatttttaaattatctgtagagatgaggtcttgctctgttgcccaagttggttttgaactcctggtctcaagcattcctcctgccttggcttcccaaagcgttgggattacaggcatgagcctccatgcccagccagccctcctttatgaaggcagttagccgtattaaagcatggttctcaaccttggctacatataagaataactccaaggagacagtaaaaatactgaagccaggctgggtgcggtggcttatgcctgtaatcccggcactttggcaggctgaggtgggcggttcacaaggtcaggagttcaagaccagcctggccaacatgatgaaaccccgtctctgctaaaaatacaaaaattagctgggcatggtgaagcacgcctacagtcccagttactcaggagtctgaggcaggagaatcgcttgtacccaggaggaggaggttgcagtaagccaagattgtgccactgcactccagcctgggtgacagagccagactccatctcaagaaaaaaataaaaataaaagtgggcttatgtattgttattttttccacatacataagcaattaaatggcatgagacagtgttaggtcttcttttttgtttgttttgagacagagtttcgctgttgttgcccaggctggagtgtaatggcgcgatctccactcactgcaacctctgcctcccggattgaagggattctcctgcctcagcctctcgagtagctgagactacaggcgcctgccaccacacctggctaattttttgtatttttagtagagatggggtttcaccatgttggccaggctggttgaaaactccagacctcaggtgatccactggccttggcctccaaaagtgctgggattacaagtgctagccaccgtgcccagacagcattaggtcttttaagagagacaggagaaaggagctgctggagtcaaaggcggaagcaacagtttgtaccagcaactccagtctgctcaaagggaaggaagattctggaaggcaggagatttgggtaaaaggatggttctcactgaggcctggccagtacccaaggtggcaaacccagtctgtgctttgtgtccctcggtgtggccctgtagagagctgccctgagtgagtccaaccttggaggagagcayggggaaagctctccagatcacagagcttcgggaaggtagtgtcaccttgaacctgtttgaaaaggcttcttctgtagaatagctagaaggcaggcctcacaagtttttcttttttaagcaatttcaatttttattattttttttatagagacaggagtctcacattgttccccatgctgatctcgaactcctggcctcaagtgatcctcctgcctcagcctcccartgtgctgagattgcaggcatgagccactgmgcctggcctcaaattttatttaggttcagggggtacatgtgcaggtttgttacatgagtatattgcgtgatgctgaggtttggggtgcgaatgacctcgatacccragtagtgagcacagtaccagtagatagtttctcaacccttgcctgcctccctccagtcttgcagtccccagtgtctgttttttccatctttatgtccataactagctaatgtttagctcccacttgtaagtcagaacacgcagtatttgattttctgttcctgtgttaattcgcttaggatartggcctccagccgcatccacgccgctgcagaggacgtggttttgttcctttttgtggctgcaaagtttttcagttaacaagaaataccatatggcgtcataaaacttttatttatttttatttattttttatttttgagacagagttttgctcttgtcacctaggccagagtgcagtgtcatgatctcggctcactgcaacctctgcctcctgggttcaagagattctcttgcctcagcctcctaagtagctgggattacaggcatgcgccaccacacctggccaatttttatatttttgctagagacagggattcgccatgttggycaggctggtctcgaactcctgacctcaggtgatctgcctgccttggcctcccaaagtgctgggattacaggtgtgagccaccacgcctggactataaaacttttaaaaacagatcaggaaaaaaaaatgtcttgagtccaacatcccagagaaaaccacatggtgattggtcctgctgccatctcactgatgacgatcatagctcactacagcttcaaacccctgaactcaagtgatcctcccgcctcagcctcttgagtagctaggattaccagtgcacaccatgaagtccaactaccattatcatctttgtcaccatcaccatcatcttcagcatcatcaccatcatcatcactgtcattgtcattatcactctcacaccacaattcccagcatcctcctcctcctcctccccctcatcatcatcatcatcatcaccacctacctgggggaactgggatggctctctttcccagacctgtttctggacctgatggcctatgagatgatgatagaactaatcccacatcccgaaatgccgataaatccagtcttgcatccagatgagttctggctgaactgctcaaggtctctgagacccagcctttgcattttggtcccacagaggcatcagcttcagtgagacagcagcagccgatgccgcccttggctacatcattgccttcctggtactcctgtccacagtgaagctttggcatctgctcaggttgaatcccaaaatgaacatgatcacggcagccctacgccgtgcctggggcgacatttcaggctttatgattgtcatccttaccatgctcctggcttactccatcgcggtaagtatctgctttgggaaaagttcggggagggtctctgcagaaaccaaggctaattggtggtgggaaagtggacagttagggttagggaggccctgggaacccaaggaaggtggtggctcttgtaagtacagggtctctttgctgtgagctcatgcaccagtcatctcaaatggcaaaggctggagagctcaggtggatagggtgaggaggcataggctctagtgctgaaaggatccaggtttgggaagaattcctttctggctctagacccctcctggatgtgccagttatcctggcttcccaactggtcagaaggcacagggctaactcctagacacacacagagcactgctgctatgctgggggatggatggggccaccacgtccttgagttggggcagaggtggggatgtgaaggtagatacatccacaggccatgccagtgcttgttgtccaaaacatgactcatgagcttgggagggccaatgccacttcactcagcactttaagagcacattgacaagcatggccctgtgtagaaaaacataaatgaaaacattgaattttcttttttgttgttgagacggagtcttgttctgctgcccaggttggagtgcagtggcacgatgtaggctcactgcaaccttcaccgcccaggttcaagcgattctcttgcctcattctcctgagtagctgggattgctggtgtacaccaccatgcctggctaattttgtatttgtagtagagacagggtttcaccatgttggtcaggctggtctcgatctcctgacttcaggtgatccacccacctcggcctcccaaagtgctgggattacaggcatgagcgaccgtgtgtggctttttttttttttttttggagacagagtctcactctgttgcccaggctggagtgcagtgtcacaatctcggctcactgcaacctctgcctcccaggttcaagcgattctcctgtttcagcctcctgagtagctgggactataggyatgtgccacgacacccggccaatttttgtatttttggtaaaaacagtgtttcatcatgttggtctcaaactcctgacctcaggtaatctgcctaccttggccgcccaaagcgctgggattacaggcgtgagccaccgcgcccagccaaaaacattaaattttcaattcttttttatgatcatgtgagaaacaaagcccctcttacatcctggcccccaccacatcctgatgtccttctaaatacaccccctactgcccaccatgttcccatgcgagycctggccttccgttcatctctggcctttagcacaatcctggcccactccctaccccagggccttccccatcctcaccctggctccatccagtctcttgccttcctctcctccctgatcatcctatccaccagcccatcgcatcctagtcyccactccaccccaaccctcaccccactctgcctccctgtcacctcaggcttgaccccttccatccctagccccacccgatcttcctctcccacccctggaaacaggtggggtgcactgagggagtgatgggggtgtgttctggaaagttggagtctgtgattttggtgaaagctcccgtctaaatcctaatgtgaatttcttcagacctccatgcagtgtctgggctgcagggacattgcagtgtcccatgggaccaaaagtcatcaactcagagacagagccaggggctgctgggcctccctctgacactgcagccctgggaaagtcttgggagtgaggggttgtggtgagggaaaatgcagtgaggggaggkcctcacccaggcagaagcccatcatccattcaacccagttccccagagcgaagggtttggagccgcagagtgcccagactcattgtcaggtatttgcaccgcatctggggaacactgcagtggcttagcaggtggctgcctgagccccagaggcaccctgggcactccctcatcctggtgggcacagagataggcatcatcaacaggccatggacacaataaaggtcctggacaaggtcatccaggcagcacttccagaaacttgacacacacgtgcacatggatgcacacacgtgcacacctacacacatgcacacatgcacgcgcatacacgtacacacaaacaaatatacacacacatatgcacacacataaacactatacatggatacacacacatacacatatacacatgcatgtgcacacaaatacactacacatagatacacacrtatacatacacaaaagtgcatatgtgcagatattgatgcccacaggcatacacatgtacactctcacacagacacacgtgtggcctcgcatgcacagacccacagagagaaacacatgcatgccacatagaaccagttgtggaccgggtgcagtggctcacgcccataatcctatcactttgggaggccaaggtgggtggatcacctgagatccggagttcgaggccagcctgaccaacatggtgaaaccctgtctctacgaaaaatagaaaaattagccagacgtggtggtgtgtgcctgtagtcccagctacttgtgaggctgagggaggagaatcgcttgaacccaggaggcggaggctgcagtgagcccagatcgaaccattgtwctccagcctgggtgacagagcaagactccatctcgcaaaaaaaacaaacaaaaacctgttgtgtacacacacccacttgcacacccctgtaggtacagtagcttgaccagcccagccagggcagtggctgacacagaccacccactccactgtgaaacagcaggctgtttgggccttggcagcctccttccctgttcatgagaattctttccatgacagtcaaacttgatatttggttggaaactccgttcctacaaaaccctctttgatgcggcggagacgatggtcagccttcagctgggaatcttcaactacgaggaggtaacggggtgagggcacggttgctgccatctatacggagcctctgtgaagattagaaaaagcactccctgtccaccccgccccgtgccatcccttgggcccatggcctggcaagcaccgggcaagtctggacaaacagaaatgttccycctcctctaggtagacacccctgctagagcccacagcttgcccttgggatccctgctcacagaggaacattgggtgctggctactcaggggagggctgtacaggggtctcccamagraaacaccccctaccctgggcagaaagggcagccgtctttsgaggtggcagccgtggaaagtgaggggctgcccgttctctccttgcccagctctctcagccccaggcagaggggaccttccaggctctaggctctgcctaactctgaggaccattttccctctgagggttcccaktaggggaagtggctactgggacccaggacactggatgaccctggctttctttctgacaggtcctggactatagcccagtgcttggctccttcctcattggrtcctgcattgtttttatgacatttgtggtgctgaacctgtttatctctgtcatcctggtggccttcagtgaggagcaaaaatactatcaggtgagtcgctttggcctattcctcatcagtcattgaactatgaagaggctggagcggtgttagactttagggaacttgagagatcattgtagctcagagccctcatttaacaggaggggaaactcaggcatagacagaggacattaattccccaaaatcacaagcaagtgaggggcagggctgggaccagagctgtgtctcctgattcccaatgtgagactctgttcgcgacaccagtgacctccaccctgagtgcaccttagaatcacctggggccttttggaaacaacggctgcccagccagagaccaataccaacagagaccaacaccaacagagaccaacaccaacagagactaataccaacagagaccaacaccgacagaatctctgggagaatgagccagtccttggtatgtttgaaatctctttgggtaactttttttttcttgagacagagtttttgctcttgttgcccaggctggagtgcaatggcacaatcttggctcactgtaacctccacctcctgggttcaagcgattctcctgcctcagcctcccaagtagctgggattacaggcatgcgccaccacacctggctaattttttgtatttagtagagacggggttttaccatgttggtcaggctggtcttgaactcctgacctcaggtgatccaccaatcttggcctcccaaagtgctggggttacagacatgagctaccacgcccagccatctctttgggtaattttcaggttaatgaacagccaaggttgaaaacacatactacactccaaaacctcaacccacgtcgtcatggctcggagggcaacaagctgggcactcgtgatcgacctcccacccatggaagagtcagcgtgctgggctgcctgcaggaagagggatatgagcacacagactgcaggttaataacagccaccagcaccacccacacagcgctctcttcacaaccgaagttgtgttttatttaatcgtcaaaacagctctctgaagtaggtataattattcacaacgtacaaagaaggaaaccaaggctcacagagatgaaatcatttacctagaaccacagagctagaaagtaggaaaggtgggatttcaacctggatctgtctgacttggatgtatggttttgttttgttttcttttcctgcccttctggaggtatgactgtgtgaacggtgacgtattatgcagctcacccttcctgtcccagttgaaagattctttcaatctgtatgcctaagccgggtgtggtggcacacacctgtagtcctagctacacaggaggctgaggtgggaggatcacctgagcccaggagacgaagcctgcagtgagctgtgatcatgccactgcactccagcctgggtgacaaagcaagatcctgtctcaaaagaaaaaaaagaaaaatctgcacgtctaacaaagaaacctttgttaagacactcttctttgaatttttccatttctatacaagagcagcaatttggtattgttgtttttctaaattgcaaaagatttcataaaggtgacatactccatcatgttgaaggatcattgtaaagagttatttttcctggaaaccaggaaattattgcccacaggattcaagaatgctaagartgctgcccctcttctgttgctaaatggwctctggtacgcttgtaacgtgtgtcccggatctgtgtttggaaaggaaatacaaatttttatttctactaaactctcacttaamagaacacttctgtgaccaaatgtgtggagattttctgcacacaccaagcaattctccagcagacaccaactgggtatcttataccgattgggcatccctaatccaaaaatcagaaatccagaatgctccaaaatccaaaattgtttgcatgctcacctgaggtgaaacatggaaaattccacacataaatacttaatacaaactttgtttcatgcacaaaattattgaaaatactgagccagtgttcacttcagcagcacatatgctaaaatcggaatgatacagagaggatcagcatgacccctgtgcaaggaggtcgtgcaaattcacgaagtgtttcayatttttaatataattttaaaataaaaaaatatatactgggctgggcccagtggctcacgcctgcaatcccagcactttgggaagctgagacaggagaatcacttgaggccaggagttcaagaccagcctgggcaatatagaaagaccctatctgtgcaaaaaatacaaaaattagctgggcctggtggcatgtgcctcttcttctggctacttgggaggatagcttgagcccaggatgcagtaagccatgattgcaccactgctctctagcctgcacgacagagcaagatgctatctctaaaacataaataaaaattaaaaacacatattgtatgaaattacctccaggctatgtgtataaggtgtatataaatataaataaatttcctgtttagtcttgggtcccattcccaagatacctcattatgcattctccaaaatctgaaaaaatctgaaacacaaaacactagtcatcccaagcattttggatgagggatactcaayctgtataacaactatttatatatagcatttacattgtgttaagtattataagtacttactggtacttataggccaggtgcagtggctcaaacctgtaatcccagcactttgggaggctgaggcgggctgatcacctgaggtcaggagttcgagaccagcctcaacatggagaaaccccatctctactaaaaatacaaaattagcccggcgtagtggtacatgcctgtaatctcagctactcgggaggctgaggcaggagaattgcttgaacctgggaggcggaggttgcggtgagctgagatcgtgccattgcactccagcctgggcaacaagagcagaaactccatcccaaaaaaaaagaaaaaaaaaggtacttatagatgatgacttaaagtatacaggagaatgtgtgtgggttatatgtaaatattatggctttttttttttttttttttttatcagagacttgaccatccgaggattttctggtgacctgcctcatcctgaagctatctaggggcctgccctaagtcactcattagcaaaaactcagatgtgatgaaagggggctcatcatgaatagcaaaagacactcctattattgccgggcgcggtggctcacgcctgtaatcccagcactttgggaggccgaggcgggcggatcacctgaggtcgggagttcgagaccagcctgaccaacatggagaaaccccgtctctactaaaaatacaaaaaaattagctgggcatggtggcacatgcctgtaatctcagctacttgggaggctgaggcaggagaatcgcttgaatgcaggaggcggaggttgcagtgagccaagatcacgccattgcactccagcctgggcaacaaaagcaaaactctgtctaaaaaaaaaaaaaaaaaagacactcctattattagtaaattctaagggtttcaggagctctgtgatgggaaccgaggtcaaagatcaamtatggttcatattataccacaatgcctttgtcctgcaaaaagatttgatattttaaaaacaattttgtagtgttggggaaatgttttcattttagcaaggaagcagagagcattgctaggtctgatgcccaggtactccaactgtaccttaatttggagatgcaattaagtagccacctttaattaaagttactttctccgagtgggttccttctatcagaagattgaacttgtccattgtaaataaattatttttttaacaatgaagatatatttcatgtgccataaaattagccattttaaatcrtacaattaaacgttttttagtatattcagagagttgtgcaaacatcgtcactaattccagaatattttttttctttcttttttttttgagagagcgtctcgctccatcgcccaggctggagtgcagtggcagatctcggctaactgcaccctcccmctcccgggtttaagtgattctcctgcctcagcctcttaagcagctgggactacaggagcacgccaccatgcctggctaattttttgtatttttagtagaagcggggtttcaccatgttagccaggctgstctggaasttctgaccttgtcatttgcccacctcggttttccaaagtgttgggattacaggtattagccaccacacccggccttcttttttttttttttaatagagacggggttttgctatgtggctcaggttgttctcaaactcctaggctcaagcaatccacccaccttggcttcccgaagtgctaggattacaggtgtgagccaccacacccagccctagaacattttctttttctttttttcttttcttttctgttttttgtttgtttgttttgttttttgttttgttttgttttgttttgagccagagtcttgctctctcacccaggctggagtgcagtggcgtgatcttggctcactgcaacctccgcctcccgagttcaaatgattcttttgcctcagcatcctgagtagctgggattacaggtgcctgccaccacacccagataatttttgtatttttagtagggatgagtttttccatgttggccagggtggtctcgaactcctgatctcaggtgatctgccagcctcggcctcccaaagtgctgggattacaggtgtgagccaccgtgcctgggctcagaacattttcaataccacaaagaagccccctacctattaataatcacctcccatatccatgcctccagcccctggcaaccactaatctacgttctatttctttggatttgcctattctggaaattcatattcatataaatgagctcggacaatatgtggccttttatgtctggcttatttcatttagtatcatgtcttcaagattcatccatgtcgtagcgtgtatccacgtcattcctttttacggctgagtcatatttcattgtgtgggtaaaacaacgatgtgcttatccattccccagctgatgggtatttgggttgtttctgtattttggctttaacaaacgatgctgctatgaacattctgtgggcagaatttcatatggacatgtgttttcgcttctcttgggcatatacctggaagtgaaatttctggtttacacagtaactgtttaattgtttgaagacctgccacactgttttctgaagcagctgtaccattttagatccccagcagcaatgtgcaggacctttgcacataaattcttctgtttgtttgtttgcttgcttgcttttgagaaaggggcttgctctgtcacccaggctggagtgcagtggtgcaatctcagctcactggaacctcggcctcctgggctcgagccatcctcccaccttagacccagtagctgggactgcaccacacctggctaatttttttgtatttttggtagagatggggtttccccattttggccgggctggtctcaaatttctgggctcaagtgacctgcctgcctcagcctcccacattgctggaattataggtgtgaaccgtcacacctggcctgatttttaaacactcttctttttttttttgagatggagttttgctcttgttgccaggctggagtgcaatggcacgatctcggctcactgcaacctctgccacctgagttcatgcaattctcctgcttcagcctcccaagtagctgggattacaggcatgtgcccaccatgcccagctaattttgtatttttagtagagatggggtttcaccatgttggtcaggctggtctcaaactcctgacctcaggtgatctgcctaccttggcctcccaaagtgctgggattacaggtgtgagccaccacttccagctgtgatttttaaaattatctgtagagatggggtctcactatgttgtccaggatggactcgaactcctaggatcaagcaatcgtctcaccttggcctcccaaaatcctgggattataaatataataagcccctgtgctcagcctgtacataagttcttaacagcctctgttggggtggtagagagcattttctgacgagtttactgaacgtgcctcattggtacctatagtctgccattcctgtttcctagaagttgttctttctttgctttaagtcactcttaaatatgtgtatatggttgagaagtgtgggaaagccagagagaaacatctatttattttttcattcccagaacttcctcccataccaggctaggccaggaggtaaacagagcaagcagaaggaataataataaagaaccacaaggccaggcccagaggctcacgcctctaatcctagcactttgggaggcygaggtgggtgaatcacctgaggtcaggagttcgagaccagccccgccaacatggtgaaaccctgtctctaccaaagatacaaaaattagctgggcgtggtggtgtgtgcctataatcccagctactcgggaggctgaggcaggagaatagctggaatccaggaggcggaggctgcagtgagccgagattgagccactgcactccagcctcggcgacagagctagactctgtctcagaaaaaaaaagaacgaaagaaggagccaccaccaacactctgacctagaggaaaaggggagacactcatctcagaagggggcccatgtgctgtttaacttcaggctcagccgcccagccgaggcttactctgcgctggcttgggaatttgaaatgtggcagtgaaaactcagtcatcctcatcagagaggtggagggagcccgctgaggataaaggatggagcacacacccttggcattcccagagggaggcctttctgccctaaaacagctctcaacagtgaagtaacctaggttgagaccaaactggacaataaaactgtgatttcggccagggatgatgcgatggctcaagcctgtaatcatcccagcactttgggaggccgaggcaggtggatcactagatgccaggagtttgatacctgcctggccaacatggtaaaactctctctctactaaaaatacaaaaattagctgagcgtggtggcgggtgcctgtaatcccaactactcgggaggctgaggcgggagaatcgcttgaactcgggaggcggaagttgcagtgagccaagattgtgcgactgcactccagcctgggcgacacagtgagactccatctcaaacaataaaataaaataaaataaataaaaataaaaactatgacttccccttagaaagaaaagcccccaaagaagatggttctatgggcattgcctggttctttctcttgcagctgtcggaggaaggggagatcgtagatttgctgctgatgaaaatactcagtttcctgggcattaagtctaagagagaggagcctggaagcagcagggagcagcctgggtctctgtcccagactcgccactctcgaccagcacaagctttgcccaaggactaagctgttcgtccacacgccaccatctaccagtggggacgcccagggcctcgggcgtacgcttaccagcgactctatagtctctctaggtcatagctttcatgtccattgaagaattaccaagcccagcaagtaaaaaaaattacaataacagagatatatgtaaaattgccaatactatgagagcttctttgttcaaatgtatttcctcttattataaataaaacaaatattacatggagtttggaaaatttcctgcacagactaattatttcgtctttttagtccgttgggggttgcttttgaatgattctagttcagggcttctcaaactgtctgagagatgctaatggatgctgtattagtttcccagaacaatgtatcacaaacgaagtggcttaaaacgacagaaatgcattctgtcccagctctggagcctggaagtgtgcaatcaagatgttggcagtggccgggcatggtggctcacgcctgtaatcccagcactttgggaggccgaggcgtgcggatcacttgaggccaggagttcgagaccagcctggccaacagggtgaaaccctgtctctactaaaaatacaaaaattaaccaggtgtggtggcgggcgcctgtagtcccagctactcaggaggctgaggcaggagaatcccttgaacccgggaggcggaggttgcagtgagcctaggtggtgccactgtactccagcccgggcgacagagcatgactccgtctcacaaaaaaaaaaaagaaaagaaagaaaaaagatgttggcagtgccatgctccctctgagggctctagggaagaatccttcttgcctcttccagcttttggtgttggccagccagccttggtgtcccttggcttctagatgtgtcactcccagatgggaagaagcttgctgggagcctgtgttccttctccttttctcagcacaccagccatattgaattaggggcccaccctagtccagggtgacctcatctgaactaattataatacatctgcagggatcctgtttcccaatatggtcacatctgaagaactgggacttaggactttgacatacctctttaggagccacaattcaaaccagaacaggtgtcattcctccaaaaatgtttctgggtcaaataaatatggggaatactggtttataaaagtttttttgtttgtttgtttgtttgtttgagacagggtcttgctctgttgcccaggctggaatgcagtggcatgatttcagctcactgaaacctctgcctcccaagatcaaatgattcttgtgtctcaggcttcccagtatctgggactacaggcacacaagagcatgcctgggtaatttttgtatttttttgtagagacggggtttcaccatgttggccaggctggtcttgaactcctggcctcaagtgatctgcctacctaggcctcccacagtgctgggattacaggcatgagccaccgcacccagtctactgtattgttataagaggaaaatatgtctatcagctcaaagagatgaatgggcccctctcaaaacacctggaagaaatgaccacctggaattttccagagcttatactcaatgggcaacgagatgacctttaaaatctcaaaccaggaggttacaaagattactaggtagaaaaagaaaaaaaattttgactgtcttcaatgctttttaccaaaagaaaaacacatgtcatattttttggtggaagggcctttttgtagcccatatgttgatgttgatgtgtgatctttttcttcccatcacatgagttagtgaagctgagaataaatatgttagggtgtaagtggcacgatgctgcactgtcttgtaatgaaacaacaatagaaaacaaaatcttgacattagagaaggtagccaagatctgtagtgcagggtagaccagcgtgatccagtcagcatcccaaacgaaagcaagcggagcagagcttaagagcaattgctggccaggcacggtggttcatgcctgtaatcccagcactttggaaggccgaggtgggtggattacaaggtcaggagttcgagaccagcttggccaacatagtgaaaccccatctctactaaacatacaaaaattagacgggcgtggtggcacgtggtcctgtagtcccagccactcgggaggctgaagcaggagaattgcttgaacccgggaggcagaggttgcagtgagccaagatcacgccactgcgctccagcttgggcgacagagctagacttcgtctcgaaaaaaaaaaagaaaaaaagaagagttgctttctaatcagtgtagaggccaaggtctactactgccacctaggagctacttaagccacaaaaacgcctccccgatcccactcctcggaagtgccttcacctctgagcctcatctatgaaatgagtgtaacacctgccagaaagaggtttggagaggattaaaaagatgtgtgcatagtgccaggcacatagcaaaggctcaatagatgggaatgatttgctcaaaagaaagtgggcatgacggcccttgcaagccactgcacagatgtggtggcaaccctaagttcatagcagggcagaagctcagtgcaacaacgtatgggctccccaaacacacacacactccatggtgtgcaccctatggtactgtttccggtgtttgaacaagaacaactccattttgaatatgggctgggtaaaatgaggctgagacttggtgggctgcattcccaggaggttaggcattctttttatttgtatttttttctgaagcagagtctcgctctgtcacccaggctggagtgcagtggcgtgatctcgactcactgcaacctctgcctcccaggctcaagtgattctcgtgcctcagcctcctgagtagctgggattacaggcacctgccaccatgcctggctaaactttggatttgtagtagagacgggggtttctccatgttggccaggttggtctcgaactcctgacctcaagtgattcacctgcctcacttagtcacaggatgagctagggttggcacaagatacaggtcacaaagtccctgctgataaaataggatgcggtaaaggagctggccaaaactcaccaaaaccaagatggcgacctctggtaggtctcactgctcattatacgctaattataatgcattagcatgttaaaaaaaaaacaactcccaccagcgtcatgacagttcacaaatgcaatggcaacgtccagagaagttaccctatagtccaaaaagcggaggaaccgttagttctaggaaatccctgccccttttctggagaactcttgaatgatccaccccttgtttagcatacaatcaagaaataactataagtacacttagtcgagaagccatactgctgctctgtctacgaagaagccattcttttttttctttacttctctattaaacgtgctttcactttatagactctccccaaattctttcttgcatgaggtccaaaaaccctctcttggggtctggattgggagccctttctgtaacagtactaaaggtgtgtgtgtagcttaaggtgtttttcagaacagtatttctttgctgactcatggccactccataaaatctgtgttaaaggtgaggtttttcccagaacctaatttttttctgacttcttggattgggatgatgacttcggcttttctcggaaggccttggtcacaccgctggccgatgaaacaaggaattgtgcacactgggtctcagctctctgcgttttgaatatttctgcattagtgactggcttgggtccagtctccaccaagaagccacttatgacccttggacaagtctttattcctttttaagtaagcttctggattctgccggtcctgtttggggtccctggggctctttgagacaggaacgttacagagcagttgaaggagaatagaaacttccaggctgcagttctgtctaacaaaaggaaactgttgaaatagctgcacaagctatgggctaagaccctgaaaaaccagggtgtgggtcaacctggctaaaaccaactggacccaacgtggtgtggctttgacctaggcttcacctaggactcattaacatactaagtcacacacccaccggcaccacaacaattccgggaacacccatatttggtgtaaaaatgggtggcaccacagttctgacaagtctccaccttattccagaaacctttgtgcatattccatttctcaaagaaacccataaagatggaaaccccaagccccattgtgtggccctcttttgagtccgccctttcttcagtgtgtactttgcagtaaacctctgtactttcacgactttccgacttgttcttgaattccttcgtgaggtggtgaaaccacctttgaaaacttatgacagaggcagtaaaagagatacacatgtggaaaggaacccagtctggggctaggccccgcccccctcctgcgggcagcccaatcatacccaggcccgccgcgctagtctccgcctctcggtgctgcctcttccgggcctcaggttcttccccatgcccacgcccctctttcgcgtcgccgtatccgaggtcgcgccaggccctggagtccccagtctccgcgtgctggccaatcagaccctgcctcgccccctcgcctgggagtctccgccctccacgctctgcccagtcaggctctgtcccgcccccgcggcaccgcctccgcgcctccatccagccggctccctccggccgcgaactgcccctccccgccccgcctcccggcgcgggtggccgaggcgtagcgctgcgacccccgcacccctgcgaacatggcgctgcgagtggtgcggagcgtgcgggccctgctctgcaccctgcgcgcggtcccgttacccgccgcgccctgcccgccgaggccctggcagctgggggtgggcgccgtccgtacgctgcgcactggacccgctctgctctcgggtaagcgcggcgggcacgtgggcggctgctccctccccgcctgggctgcttgtcccgggcccagcgggacacggaggacgccggggcaccgctcctgagccaccggggcggagcgagcgcggaccctgcccccttcttatttctgttgggatccctggctctgcggccgcttctcccccttaagtagcgggaggacccgcgagtagcctttgccctagggattgcatgcagccgggagggtaggcctgcgggacaccgaggcgggggtggcccggcgggtccggcgggcaggtcggccgcttgctgcagaagccaggcacgtgtcgcttaagcgtctcggtggccttaagtttatctcccatctgcgtgcatcgttgagaccccaaatggggaggcctttagtttactaaatggaccgttactgagaactccgaagtaaaattaaaacagaagcgcttattaaaattaaagcaccaggcagggcgcgttggctcatgccggagggcggatcacgaggtcaggagatcgagactatcctggctaacacggtgaaatcccatctctactaaaagtacaaaaaattagccaggcgtggcggcatgcgcatgtaatcccagctactcgggaggctgaggcaggagaatcgcttgaacctgggaggcagaggttgcagtgagccgagatcgcgccactgcactccagcctgggcgacagagcaaaactccacctcaaaaaaaaaaaaaaaaaaaaaaattaaagcgccagatctagatttttttactagataaaacaatcataactttgaagattcagctatttccccaaaacaagtaagataaagtcttctggactcaacagaagttctgctaaagtttgtattggatcattcatgtgtgtgcttgctgaaatgagccctaactcaaacggacttgaaataactgggaaacctgcccatgaatgtttcggccatttgtgctacttcagcacaattattgcaggggaaaaacaattttctttttttttttttttctttttattgagacggagcctcgctctgtcgcccaggctggagtgcagcggcgtgatctcggctcactgcaagcgccacctcccagattcaagcgattctcttgcctcagcctcccgagtagctgggttcactggcgcccgtcaccacctccagctgagttttgtatttttagtagagacagggtttcgccacgttaggatggtctcaaactcctgacctcaa

SEQ ID NO: 97372 - DNA, 14529 bp, Homo sapiens
  misc_feature (1)...(14529): n = A,T,C or G
tgagtggcttcgtctcttggccactgtaggttgagctgctgtgaacactgtatacgagcctctgcgtggatgtgtgtttgaatttctcctgggcatatacgtaggagtagaatagctggatcatgcggtagctctccgttcgatggtttgaggaactgccagacgtgggttgtgtttttgcagcaagaactcattctgcagtttgccctgcagtgggtgttttgccgcatcagtcggcggtctctggcctacagcatggttgtggggtttggggggccctgctgtggtaggtggaggcgaggaggaacacctgccacctctaggcaatacacaaggaatttttttacataatgtgacatttttataccatcggactattggaaagcatttctttcttaagtttcattctctgatgcctagacaaaaatagactgaggaactgtaaaaaggcactgaccatatttccctgaaagccaggcacttgagcattgcaattaactcttcttttttctctcctctgctgtcaagaagtaaatagaaactaacagctgagcagtttggatgtatgttagctgatgactcacgaagcattcacagccagggggccagctgctcttctgctatagaaagaaaacctattttggccgggcttggtgattcacgcctgtcatcccagcactttgggaggccgaggcgggtggatcacgaggtcaggagttcaagaccagcctggccaagatggtgaaaccccgtgtctctactaaaaatacaaaaattatccggccgtggtggcaggcgcctgtatttccagctactcgggaggctgaggcatgagaatcgctcgaacccagggggcagaggttgcagtgagccaagatcgcaccactgcactccagcctgggcgacagaggaagactctgtctcaaaaaaaaaaaaaaaagaaaagaaaagaaagaaagaaaacgtatcttaagcaaaactgtaacctcatggatggcccagatgtaccagagccctgaagacaaaacccattttcacacagggctcccgccacagccccgcccatggccccacccactgccgccatgccctgcccccttaccaccagccccacccactgcccccgtgccctgcccccttgccacccatcctgcctactgccaagttccctctccccttaccacccacccaacccactgcccccatgccctccccctgctccatcccccactccatccactgccctggtgttccaccccctgtctcctgcccccatgccaggtccctgctccacccaccctgcccactgaccctcatgccccaccccctgtacaacccctgaccccacccactgcccccatgccccaccccctgtaccatgcctcaccccactgaccccgcattccaccctctgcccccatgacccacccctgcccccgtgttccacccctgtcccctgcccccccaccgtgcccaccccctgctccacctgccccacccactgcttcactcatcccgcccactgcccccatgcctgccctctgctccacccattccacctctgctctcctgccatgctctcccggtccctctctgcacaccctacccacacctgctcatccccaccctcagcagccggagctgtagctgctggacaggtaggggaggtctgggtgggcccgggtgagcccatgggaagtgtgagggaccaaggagacccctcaggtgtgtgttcacagaccccagggtgatgaggctccaacagcccaggagggcgtgtcctgcatggccggaggagctgggggtgaggactggggtggacagggcctcacacaaggctggacacagatccccttggcctgtacctggggagggtagcgctgatccctgggcaggctgtggctcgggcctccgcagctccacatggctgctgcctgtcctggaccccaggcatccacaccgcaggctagctgttctccagcctccaaggctcagaccctgggtgtacacaccacactccagtggacacttggagtgtccagcctctaaggcttgtgtccttgtgttcttgccccacctcctgccgggtttctgcccctgatggttcacaccaggcggacccgagtagagaagacgggatgggtctgggctcacatgggtgcgctatcgtttctgttctggaaagttccagcaggacctcaccaccccgctgttcccgcctggctctacagttcagagctgccagggttcccactcaggctctagagcttgaaaacccctcagtcgtcagggggagggatgcaggctaaacgtacaaacttcaattggagccggtgctgcagttgttggtggccgaaggccacccgttctgagccccgtgccagctcctaacctggtcacggcccccgcagcagcctgcatgggcagcctcccccatgtgcctgctgtggggagaatctcgggttttgagtggctcaagcaggaccagcttcaaggagtgcggggggagtattgctccctggtctcagcccaggcccccgcctggggaggtcagcagctgcgcctgagggtgaggtggggctgccagaaggagcaggatgctggaggggaggacaagaaggaggtggacggacagggacccttcaaaaggtgccacttttcaaagccagagcaggcacggccattccccagggtacaagggggacccatctgctcctcccaacaccacagcagcttcgcttaggatggaggtgacgccgcaggctggtgggaagagatggccccaggtccctgcagaggctccaccggctgcgggcagccctgaggcggccagaccccacacaggccgacaggagccacgtggaggacacaaaggctcctgccggctcagctacgccccctagttagggctgaccccctcttgggaacacctgtttctgtccgttcgtgtctttaatccacgtcccacctggcgagtgttgtgggcttcattttgcatacttggaggtcagagggagtgagaaatttggctggggtggaatcctgactccactcctcccagccgggttgccaagtggtttgggcagcagggccccctctgggcctcagtttccccgtgtctcgagtgggagcggctccttgcacctgtgaggtgtttaccgctgccagcgcaggtgctgcccagttatatcagttgacatcggctgttgggtggagcctcagttctgcgcccgttaccctccaacacccagggtgtgcgcattacccaagcctgcagagttttgtttaatttttggtgattgcagcacggtagccaaactcatcctactcattagcatatcctgggcatctcagggagccacaagaggaaagtgtgccacaagttccacgaccaccctgggccatcctgggcacagcagacactatttttttttttttttgagacagactctcgctctgtcacccaggctggagtgtagtggtgcaatctcagctcactacaacctccaccttccgggttcaggtgattctcctgcctcagcctcctgagtagctgggactacaggtgcccgccaccacacccagctactttttatatttttagtagagacagggtttcaccatgttggccaggctggtctcgaactcctgacctcaggtgatccgcccacctcggcctcccaaactgctgggattacaggcacaagccactgcacctggctggcagacactttctgagtgcaccaggctctgcggcggtgtcgtgggggcgctgggctctgggtgggggcaccaggctcggtggcaatgtcacgggatccttggggtgttgcttcgccagctggaaacctctgtggccagtcgcacctttgcccaagtttttactcaggcccactgggctcattcagtgcacttggcctgacaggctgtgctcagctcatgctactggtatgaatctcacacctgccaggcatggagtggcgaggggtgtgtgagggagaaatcgtgaggtctggccactgtgcacagccaggcacaccggctatggtagagcgggccatttcgggtgccactgggggcgctggctccctgcgaggctgcagctggaccaggtgcaccatgagcaggttccatggctggcacgggggaatgcaggggcacccagaaacttggagacgccgggagccgcagagcctcagagacggtgtcgcaggcctggctggggaggtcttaggtctgggcttcccgaagggacacagctcttctctccctctctcttctctccttcttgtcactcacaacattgttagcaagggacgtgtttcagccctgtttgtgtgacagctcttttagccctgccgtttggcaggtcacgagttcttgtcttgcatccaggaagaatgaggtatgggcacaagtagagggtgagcaaggccagcaggaaatttactgagcaacagaacagctcagaggagactcgcagtgggtagctcctctccgcaggcagggcatcccagctagcgttcagctctcagcagagaggagaccctggaatgggtagttcctctctgcagctggcagtcccaatgtctgctcagctctcagcagagaggggagcctggagcaggtagctcctctctgcagctggtagttccagcatctgctcagctctcagcggaggggggaccctggagtgggtagctcctctctgcaggcaggtcatcctgtcatctcctcaaatctggctgagtctggggttttcataggcttcagaggggaggaagtgcatgctgactggttcatgggcggccatgggtgggcctggacaaagcactataagttcccattctggtccctcagcccagctcccaggcttcaggccatccctggcttcagggtgggccttcactgtggacctgcccctttccacccaagagcctctctgcctcctgccgtcatctatggcgtctaggctgattgtgccaaggagctgccctcagccccttctcagccatggttgggaagctgcacctgcacccaggaggatggggttcctgcccactcccacccccaagagcaaaggaatgcgcagatctggaaccatggctgggcagctgccactgaacctggggagcacaaggctctctccctgctggcttggaaggtgggtggcttctgcctgttcctggctcccaccagctccgtggagcacgcagccccggcgccacctccccactgctgctggtgtcatgacagtgactgctccagacaggccgccgccatctgtgcgtgtcacatatctatgcagagactgctgcagacaggccgccgccatctgtgggcgtcgcatgcccatgcagagactgctccagacaggccgccgccatctgtgggcgtcgcatgcccacgcagtgactgctccagacgggccgccgccatctgtgggcgtcgcgtgcccacgcagagactgctccggactggccgccgccatctgtgggcgtcgcatgtctatacagagactgctccagactggccgccgccatctgtgggtgtcgcatgtctatgtagtgactgctccagacaggctgctgccgccatctgtgggtgccacatgcagagtgacccaggggcttgccacaagggggacagtcaggcagggactctgtgtgcacatgcatccaagcacaaggcaggtgtgggcagagaagcgagttggagccatcctcaggaggagtgaattactggggatgttgaccttgggacaccaggaagagaatctcatttgcagaggaggaaaacgctgctggaacggaaagtctgagaaagacagcaagagcaggccagagcaaagcaggacgcgggagtgaaggcctgcagtgtgggtgcgtgtgcaagacccagaaacgcgcagatgtgtggggccagcaacaccacggccacatcctcagccacagaacaacacacaacatctcaaggatgaactcatcaacgcaccaacggttagtctcttatctaataaataaagcatatcccggttacaaataatcaacacagatgtttcaatgatcttgagtagaaagttgagagcttgtcatttgagtcaggaaatgggactccgcggaaatgatggccttgagagagccctcatgtgttctttgtgcagtcggcaattccatgtagacaggaaaaatggactgaaaacttaaactgatatgatgaagataatatcattcaattgaaaatgaaaatggaaaaagtcatttataaaccatttgaatggacaaaaaagaaaattggttaggaattaaattagctagatgaaagtcactttttttcttttttgcttttttttttgagatggagtctcacactctattacccaggctggagtgcagtggtgcgatctcggctcactgcaacctccgcctcccgggttcaagcgattctcccgcctcagcctcctgagtagctgggattacaggcgtgagccacagtgcctggccaaaagtcactcttttttttttttttttttttttttgagacggagtctcgctctgttgccaggctggagtgcaatggagagcagtggtgcgatctcggctcactgcaagctccgcctcccgggttcacgccattctcctgcctcagcctcccgagtagctgggactacaggcgcctgccaccacgtgtggctaatttttttgtgtgtgtgtgtttttagtagaaacaggatttcaccgaataagccaagacggtctcgatctcctgaccttgtgacccacctgcctcggcctcccaaagtgctgggatttcaggcgtgagccaccgcacccggcccaaaagtcactcctaaaaatgctttctcggccgggcaggannnnnnnnnnnnnnnnnnnnnnnnnnnnnnnnnnnnnnnnnnnnnnnnnnnnnnnnnnnnnnnnnnnnnnnnnnnnnnnnnnnnnnnnnnnnnnnnnnnnnnnnnnnnnnnnnnnnnnnnnnnnnnnnnnnnnnnnnnnnnnnnnnnnnnnnnnnnnnnnnnnnnnnnnnnnnnnnnnnnnnnnnnnnnnnnnnnnnnnnnnnnnnnnnnnnnnnnnnnnnnnnnnnnnnnnnnnnnnnnnnnnnnnnnnnnnnnnnnnnnnnnnnnnnnnnnnnnnnnnnnnnnnnnnnnnnnnnnnnnnnnnnnnnnnnnnnnnnnnnnnnnnnnnnnnnnnnnnnnnnnnnnnnnnnnnnnnnnnnnnnnnnnnnnnnnnnnnnnnnnnnnnnnnnnnnnnnnnnnnnnnnnnnnnnagcactcccgcctgggcgacagagcaagactccatctcaaaaaaaaaaaaaaaaaaagtttctcaacaaaaacttaacggtggcatagttctgatgaaaatcttcatgttcatggcatggagttaaaatgtccaaacggtcaaggccacagattyaaacagggacatccgcaggccctggcccgaggggaggagcatacagggagtggttcacccactccaccgcctttggagcaccttttaattctctcactcttctctaatgtgttccttgatttatctattaccatctgcggattttcatctgttcttttttgccttttttttttttgagacggagttttgctcttgtcacccaggctggagtgcaatggcgggatctcagctcactgcaacctccgcctcccgggttcaagcgattctcctgcctcagcctcccgagtatctgggattacaagcgcccgccaccacgccccgctaatcttttttgctttttaaaattrtgaaatgcggtatacacacagaaaagtgcgtgaacacacacataygtaccatttaatagayagttataaartgatccgcccgcctcagcctcccaaagtgctgggattacaggcgtgagccaccgcttccggcctcaggagaggattcgtgtttgcttctcccaacgtccagggaagcgacatttcctatttgctttagactaaaatctatacttgaattttttgtttactgtaggtaatattaactagggttgcagtccgtggagggccgactatgcgaacggtttctatgaaccatcctttgctgaaggctgaaacctcttcgtcccctgggagagttcctattcaggccttcttgtagttagttcatccttgtgttgacagctrtattagggttctccagagagacggatccagtaggatatagacgtagatccaggacaggagatggactgggggagctggcgtttgcaattacggaggccgagaagtctgtgagcsggagaccccgggactcgggtagccgggctcagcccaggtcggaaggcctcagaagcggggaagcggatggtgtggccctcagcacgacccaccccaaatcatgccttgccaggtttctgggaattcctggtccagcccagctggcacctgacactggccgtaacggcagggccactgttagctgttagcytcagggccccaggtttaggggcggtgtctccgttgcacgtgcaccccgagcgcgcccgccactccccacatcaggagctctgttcctcgggttcagcaaacgcccgggcgaaagcaatcttaacattctgggctcccggcacccagaccttgggctgatgtcccttgctagtgggtcagctctttagaaaatatattctaactatttccatcagcatttccacttattttgtgcaggagagttgaacccaaaccgtctgggtcggggtcggtcagggccccgccccctgacgtcatctcacccccacccaatcccccgcgcctacctgcctcccggcccctccccttcccgcccctcaatcccagcgctcatctctgcggccacgcccgccccttcccgccacccaatcctagcgcttgtctctgcggccgggccccgcccccacccgccccccgcccaatcctcgcgcggactcatgtttgcccgctcggccgccgtctctcgagtctccgccagatccggggcgggtccgcggccgcggcgggaacatggaggagctgctgaggcgcgagctgggctgcagctctgtcagggccacgggccactcggggggcgggtgcatcagccagggccggagctacgacacggatcaaggacgagtgttcgtgaaagtgaaccccaaggcggaggtcaggcagcgggtcgggcgggccgggggaccggtttctttccggagagggtcgcgggcctcggcgcggggcgcggcctgggcttctcccgccggaggccgtgggtggctctcccgggactgccgccgccgccccttgcggggaaccctttgcgcggggcgagcggtgaacgggggcggcggaagcgtccggggcgtccggaggagtttgcacctgcggggaactgtccggagcaggaaccgcggccgccccacacctcctgttctccgtgaactttctctcgggggcgctacgtgaaatggggcgggtctggctgctgcagtcttgctcccggggttcctgccctgcggtgctggttaagtggggtcgttctagccggggaagctgcttaagtcctcagcttaagtgactctggaggtgtccatcccccgtgagcctcggtcagtacgttgtgaaacggggcgaaggtgctgcccccaggccagctgctgcgcctcaccacaccctggcatgctctgtccttctgttagactcattctcgggccgggcgcggtggctcacgcctgtaatcccagcactttgggagacagaggtgggtggagcgcgaagtcaggagttcgagaccagcctggccaacaaggtgaaaccccccatctctattaaaaatacaaaaattagctgggcgtggtggcgggcgcctgtaatcccagctactcgggaggctgaggcagaagaatcgcttgaacccaggaggcagaggttgcagtgagtcgagatcgcgccactgcactccagcctgctgggtgactgaatgagactccgtctcaaaaaaaaaagagtgttcctagcagcggtgacatggcagctgtggtggggctctgaggctgaggaggtggggactctgaagaactgaaagaaggatgaagacagctggaagtcaggagcacgaggagagtgtgtgtgtctatgtgtatgttgtgtgtgtgtacgttgtatgtgtgtatgtttgtaatgtttgtatgttgtgtgtatgtattgtgtgtctgtgtgtgtgtaagggtggagccccaggtgaggatgggagagtgggcagggcagtggtgtgtgtctcaggagaaaaagaaaggccgctggccctgacctgttctgcggggatcactgctgtgtatgttgtgtgtgtgtgtctgtgtgttgtgtgtgtatggtgtgtctgtaagtcgtatgttgtgtgtgttgtgtgtctgtatgtgttgtgtgtgtgttgtgtgtctgtatatgttgtgtgtgtgtgttatgtgtctgtgtgtgtaagggtggagccccagatgaggatgggagagcaggcagggcagtggtgtgtgtagcaggaggaaaggaaaggccgctggctctgacctctactctagggatcactgctgtgtggtgagcagggggacccaagggaggagttgctgtggtcccggggagttggatggaaacggcatctcaagatgaggtggtttccagtgctgggcaggaggtggcatggaacttggtggtctcttcaggtgaaaagtgaccccaggtcactggcataggcagccagggtgccgcctgcacctgagaggtcgggtgagtctgtgtcctgtaggtggaacaggactgcagttgaggtgtcgtctgaggacactgacaggtaacccatgttcacagtcccactgttgccggatcttagtggaatattagtgccttcgattttcctctctccagagaacctcccaattcaaccacagcacacaagtgtagtccaacactggaaagctcaagccctcttcttccagtacagcctctgaacctgtagcctaccctgttggcaagtgtgtttgaaaacactgtccatgtgtatggaatcctcagtcaggatagtcttggtttgaagttgtaatgctagaggaaaacatatctacagaaccttccggaagtaaccttgcctccctgtatttccacttcctctcgtatttttctgacaggccagaagaatgtttgaaggtgagatggcaagtttaactgccatcctgaaaacaaacacggtgaaagtgcccaagcccatcaaggttctggatgccccaggcggcgggagcgtgctggtgatggagcacatggacatgaggcatctgagcaggtgcatcttcacaccaccccccaccccccacctggctttattacctgagcaggtgtgtcttcacaccttgttttattacgtgtgtcttcacaccacccactggctggctttattatctgagcaggtgtgtgttcacaccaccccccagctggcttcatgccccgccccggctggctttgttatctgagcatctgagcaggtgcaccctcacaccagcccccagctggctttcttttccaccaagtggttctctgatgactgaagcttgtactggggacatcattttgaggagtgtaatgcaaagaacccgtgactccacataccatgagttctgcagaatgaacggcaggcactctctgcaaccaagggcagaagcaagaggaatctcccaaagtgagatgctgaccaaaggcctcgctgcacgccggccgcggtggctcacgcctggaatcccaacacttcgggaggctgaggcgggtgaatcacttgaggtcaggagtttgagaccagcctggccaatatggtgaaaccccatgtctaccaaaaatccaaaaattagctggatgtggtggcaggcgcctctaattccagctactcgggaggctgaggcaggagaatcacttgaacgcaggaggcagaggttgcagtgagctgagatcgcaccactgcactctagcctgggcagtagagcgagactcagtctcaaaaaagaggaaaaaaaaaccactgcaaacttggatgaggctgggaaagatcgtcaaataatcaacacctttatccccctcttgcttcaccagaacctactttctgtcctcaaaatgtccgacctactagccggctgtggtggctcacgcctctaatcccggcactttgggaggccaaggtgggcggatgacttgaggtcagagtttgagaccagtctggccaacacagtgaaaccccgcctctactaaaaatacaaaaaaattagccaggcatggtggcgggcaccagtaatcccagctactcgggaggctgaggcaggagaatcgcttgaacctgggaggcggagcttgcagtgagccgagatcgtgccactgccctccagcctgggtgacagagcgagactccatctcaaaaaaataaaaaagtttgaccctctttatgtgccctgagactgagcagtgggtgtgttgccattctgtgtgtcatctgtttagttgctgtcgtttgatttgacagtcatgctgcaaagcttggagcccagctggccgatttacaccttgataacaagaagcttggagagatgcgcctgaaggaggcgggcacagtgggtatggcactgcgcgggccacgggtgctcccgcctagaggaggacgttcagccggtgtgggctcagagcgggggccgtgcagcagccgtgggagggtcggacgtgggctgatggcagagcaagggaatgtcggccttgagccgcatctcacggtgcactgaacacagtgactgtgatgcgtctgttgtgtcctaaatgcatttgaaagatgaaaacatttgctggacacaagacacccctagtgttacagttacttttacctctcgttccccagaagagtgtaagcagaggctctctggctgtctgtaaaaggcaagacctttaacccagggtctgttcctgtaaaacagtcatacttgaggctcagaattacagccatcatgtctgacctttccagagcataacgcgctgtcaggatcgagggaattttccggtattttaatctgctgacatttggaatccgtgtgcagcccacatggtaaatgtggggagatttgctgatgatcggaacagatcaccaggggcctgctgtaggagacggagacatgctgttagtctgttctgtgagggtccatgacggatccacccaggcggcctgtgtggtgaggatccactgagaggcctcccaggtcgcctgtcctgtctcttccagtcttaacggagtttagtccattgggattttccttgaattagggagactgcagaggagtgagattctttctttctttctttcttttttttgagacggagtttcactcttgtcccccaggctggagggcagtggtgcaatcttggctcaccgcgacctctgcctcctgggttcaagcgattttcctgcctcagcctcctgagtagctgggattacaggtgcatgccactgtgcccacctaatttttgtatttttagtagagacggggtttcaccatgtaggccaggctggtctcaatctcctgacctcaggtgatccacccacctcagcctcccaaagtgctgggattacaggcgtgagccactgcaccctgcctgagattatttcaaagcacaatagtttatctgacacacatggcaccaggtttgccactgagagccatcctttctgatggattgggggcagattctttttcctctttatttatttatttttattttatttttttgagaaggagtcttgctttgttccccaggctggagtgcagtggcatgatctctgctcactgcaagctccgcctcccgggtccacgccattctcctgcctcagcctcctaagtagctgggactacaggcgcctgccaccacgcctggctaattttttgtatttttagtagagacagggtttcaccgtgttagccgggatggtctcgacttcctgacctcgtgatccacctgcctcggcctcccaaagtgctgggattacaggcatgagctactgggcctggcctgttttttactttttatgttttttatgttttgttttgttttgttttttttgaaatggagttttgctcttgttgcccaggctggagtgcagtggcgcgatctcagctcaccgcaacctccgcctcctgggttcaagtgattctcctgcctcagccttctgagtagctgggattacaggcatgcgccaccatgcccagctaattttgtatttgtagtagagatggggtttctccatgttggtcaggctggtctcaaattcccgacctcaggtgatccacctgccttggcctcccaaagtgctgggattacaggcatgaaccactgtgcccggccatttttatggttttttttgagacggagtttcactctcgttgcccaggctggagtgcaatggagcgatctcggctcactgcaacctccgcctcccgggttcaagtgattctcctgcc

SEQ ID NO: 97373 - DNA, 14462 bp, Homo sapiens
  misc_feature (1)...(14462): n = A,T,C or G
agcgatcgagcaaagcattgaacaggaggaggggctgaaccgttcctccgcggacctgcgcatccgcaagacccaggtaggaggcggcagcccattgggggtcgggtcgggacccagctcgggaggagcccaggctggaggccggcgggccagggccaagcaccggcgggggcgtggtcagggagggctggggcggggctctgggggcgaggctagagcgggcggggccctgggcggggctctcggggagggcggggtcgagccgcatctcagcgcagtagcagtgtctctagctggtgttggcctaagatgggggtgccgggcgggtagggaaccatgaacttgtcagggtttgggatcgcggccagagctgaagaagggaccgtaaactaattcagcgcttcctccttattccgcccatgcactgcctcctcacctgcctcggtctctgctccctgactccctccctgatccctgactacctccctgatccgtctgtccccccacccccaccgtagcactccacactgtcccggaagttcgtggaggtaatgaccgaatataacgcgacccagtccaagtaccgggaccgctgcaaggaccggatccagcggcaactggagatcagtgcgtgtgccccccaccccaggaccccgaactccttgaggctgcccaagcccccttccaggcatttcctctctggagggggcccctggcttaaggcggcgtgggagggtgggccccaggtccccgccccatcaccccacctcaggcccccaggctgtcccagcccccgagcagggagtcctttcttcccgcagctggaaggaccaccaccaacgaagaactggaagacatgctggagagcgggaagctggccatcttcacagatgacgtgagccgcgggtggggcgggctctgcttttggaaaatttttgcctcccctccctaagttcaggttgaactaaggtcctaagtccaccctggaaaaatgagcagcgggaagcctgagccgggaactggggaattccatgggagcggagcaggaaggcacccccatcagatgacggagtcgttcgtgtgccaggcactgttctaagcactttccatcttcacattcacccaccaactcatttaatactcacacatccccttcgaggaaaccccatttcacagatgaggaaaactggcccagagagatgaaatcacttggcaagatctcagagcgagggagagggccaggacttgaatcctgtctagtttcagagtcagaactctcgagccctaggatacacgacatactctgctactgaagcaagtcgtttcaccagagaactgatttgcctacattaaaagaaattttttttaattaaaaaaaactttttttcttttttttttcttcaagacggagttttgctcttgtcacccatgctggagtacagtggcgagatttcagctcactgcaacctccgcctcctgtgttcaagcgattctcctgccccagcctcccgagtagctgggattacaggcgcccaccactcggcctaaaaaaacctttttttgtagagatggggggtcttcctctgttgcccaggctggtctcaaacttctgggctcgaataatctgcctgcctcagcctcccaaagtgctgggattacagacgtgaaccaccgaatccagcctaatttgcctacattttgaatattttttttaaaacaagttttagttttgcttaggttttgtcccctgtgctgcccttgtccttttacatatgaaaggatgggctggccgggcccagtggctcatgcctgtaatcccagcactttgggaggccaaggcaggtagatcacctgaggtcaggagttcgagaccagcctggccaacatggcaaaactctgtctctattaaaaatacaaaaattagccgggcatggtggcacgtgcctgtaatcccagctactagggggctgaggcaggaggatcacttgaacctgggaggcggaggttgcagtgagccgagatcttgccactgcactccggcctgggcaacagactgacactctgtctcttaaaaaaaaaaaaaagaaagaaaggatgggctttccccgaacctagttcttgtttctctcagtggacttttgccccggcctgcccactcctgtctccgtttctgtttctggtggcaaaatgactctggttaagggttctagaccaggtttaaaggatgcgctatgactgtcttaaaagttttcagctcattgttatttggagaactgatctttgttgaaaacgcattgagcagcccggtgtggtggctcacatctgtaatcccagcattttgggaggccaaggaggatggagggcttgagcccaggagttcgtagaccagcccgggcaacaaagtgagacccccatctctacaaaaaaaatgtttttttgatttaaaaaacaatttcttttaatgtaggcaaatcagttctatggtgaaacctgctttaattagccaggcatggtggcgtgtgcctgtggtcccagctactcgggaggctaaggtggaaggattgcctgagtacaggaggtcaaggccgcagtgagctatgatagcaccatagcaccactgcactccagcctaggtgacagagcaagaacttgtctcaacaaagaacaaaaaccaaaaaaaaaaaaaaagacggggagactgaacactgtccaaacagccattgtatgatttcggcttatagaatggtcataggatgagcaggagatgaggggagagggagtctgggccttgactgctgaagggaaggtgtggagccttgggtagtggggagccatggcaggctgtagagcagaggagtggctcaatgtggtaagaacagtgagtaatttgggaagtgagtcacctggctgaggctgggtgtttgtggagaggaggcatatctgactgtgggtcacggtctcttccccactggctttctttttttttttttttcagcatggtctcactctgtggcccatgttggagtgaagtgaagcaatcatagctcactgcagcctcgacctcctggggtcaggcaatccttctgcctcagtttcctgagtagctgggaccacaggcgccaccatgcccagctaatttccttttttttttttttttttttgatagaaacaaagtctcactatgttgcccaggctggcctcaaattcctgggctcaagtgatcctcctgccttggcctcccagagtactggggttacaggcctctccctactgactctttttttttttttgagacggagtctcgctctgtggctcaggctggagtgcagtggcgcaatctcggctcactgcaagctccgcctcccgggttcacgccattctcctgcctcagactcccaagttgctgaaactacaggcgcccaccaccacacccggctaattttttgtatttttagtagagacggagtttcaccgcattagccaggatagtcttggtctgctgacctcgtgatccgcccgcttcagcctcccaaagttctgggattacaggcatgagctacctactgtgcccagccctgactctttttttttttttgagatggaatttcactcttgttgcccaggctggagtgcagtggcgtgatctcagctcactgcaacctctgcccccccgggttcaagcaattctcctgcctcagcctcctgagtagctatgattacaggtgcccaccaccacaccaggctaatttttatatttttagtagagacgaggtttcgccatgttggccaggctggtctcaaacttctgacctcaggtgatctacacacctcccaaagtgctgggattacaggtgtgagccatcgtgcctgaccaatgtgtacatattaactcactcagtcttcacaaccaccctgtgaggtgggcagtgttatgatccacattttctaggtggggaaactgaggccaagagcaggtaaataatgtgcctaaggtttcagctagtaaatgacaccggatttgaccctggccactccactgcggtggaggcgctcatggcggagaagggtgattgtagctctctccctcgtcaccctagatcaaaatggactcacagatgacgaagcaggcgctgaatgagattgagacgaggcacaatgagatcatcaagctggagaccagcatccgcgagctgcacgatatgtttgtggacatggccatgctcgtagagagccaggtactggctctgccacccatgccactctgggagcctccctgggcctgaggtcccctcttccagcccagcccccatccctccctgtgcatgtctcctctgtctgcagggagagatgattgaccgcatcgagtacaacgtggaacattctgtggactacgtggagcgagctgtgtctgacaccaagaaagcagtgaaatatcagagcaaggcccggagggtgagcggggcaggcggcctgggggtaggcgggggagcccaaggctgagcccgggctgaggtgagtgatggcagcgggcgggaggccttatctctggctctgacctcttcctgtttctgttttctctcccctcttctccctgccaccctctgccctgtctgtccctgcatctgtccgtgtgtcgatctctctcactgtctgcctgtctcactcctctttctgctgcagaagaaaatcatgatcatcatttgctgtgtggtgctgggggtggtcttggcgtcatccattggggggacgctgggcttgtaggccccccccacccttctctctcccagacccttcccccaccacatcgggagcaatacccccaccacccctttcactccatcccctgctccaggctcactcccaaaacagacccaggcagccccacccctcctccacccccacggcagaccctggtgtccctggacctcaccgggccatggacccccccccgtccccgcacgtagatcgcagcaggcgtgattacacatgcacaccaacatgcatgccgccggcacatgctcgagacgtgtggacaccccagcgtgcgtgtgcgtgtgatgtgtgtgatgcaccagagcaccccctccacccccaccttgggtgtgtgtgcgtggtctgagcttcccccttcaccggggctgttgtgtagactgcagccaagtgtaacacagcagtccatcacgccctctctgtcctctgtgaacagtgtgtgtgcgtgcgtgagaccacagatctgtggacacaccatttgtgtacgtggaattttgtgtttcagtgtttgaacctaatgcaacagcaacaaagccactgatacctgagccctttgtgtctgctacaaaccaggcaggtggtgtgtgtggactcacactcacattctcagaggatccagggaggcccaggtacacacaggccatggcagacaccccatgtctttgttaccccaggggctgtggcatgtcccaggagggtgtgcatgtgtgtgtgtgtgtgtgtgtgtgtgtgtccaggatgtgcctgaagtattgataggtcttctcagatagagccctccacactgtggactggacacctgttttgggagggcacagaaatgtgtatttcttgctacctagaatgcagctgtgtgtgtgtggcgtgcgtgtgtatgcacgtgtgtgtgtgtgttaggggctctctacatggtgtgctttttaatttttttttgttttttgttttttgtttttttcgagacggagtcttgctctgtcacccaggctggagtgcagtggcgcaatctcagctcactgcaacctgtgcctccctgacgcaagcgattctcatgcctcagcctcccaagtagctgggactacaggcgcctgccaccacgcctggctaattttagaattttagtagagatgaggttttgacatgttggccaggctggtctcgaactcctgacctcaggtgatccgcccactttggcctccctaagtgctggcattacaggcctgagccaccacgcctggcctacatgatgtgtttctgtcctgcctgacctacatggtgtgtttctgccctgcgtattacacacacacacacacacatgtgcgtgcacacacacttctaaggacgtggccccatctggctttgtctctccagttgtccttgccctgcccccctccccagaggtgctgcccagtgctggtgtggccacacacggctacatcattgtgcaggcagagctccctgcctgcccagcctcagggctctgcatgctcacacctagatcctcatcttcctccatgtctctgcccagcatagccccgagcccctggaagctggtaccctcannnnnnnnnnnnnnnnnnnnnnnnnnnnnnnnnnnnnnnnnnnnnnnnnnnnnnnnnnnnnnnnnnnnnnnnnnnnnnnnnnnnnnnnnnnnnnnnnnnnnnnnnnnnnnnnnnnnnnnnnnnnnnnnnnnnnnnnnnnnnnnnnnnnnnnnnnnccaggcaggggccataccaggcacaaaccatgcacgctggcatgggtgcggggatcacacgaatgcctcctggaaggaaagggctacttgtaggaatgttactgatgaggcaagatgccaaggacttccctgcagggatcaaagatcaggacacgaccccttcctcacacacccacctcagacctgggagaggactgtgtgtcccccactgccccatcggatgctctgggctctgcctcagggaactcgggtttggggaaatgtctatttcagaagtactggagtggccagtgtggcagtggccactcagggtgggctgggtcctgagacccatccccgacacctctcctgctgaaccctcaggctgctccccacaccagggtgtgactgaggggtacacaggcctggatttctggtgtgaggaaggggctagcacctcccctgttgtgtagccagcacaggcacaatttgtgggtttggtggcaggtaggtggtgcgtgggagaaaggacagtgttagaggtccccactccgtggtctaggatcatgaaaggtgaacacacaagtacacaaatgtgccatgccctggcatggggcttatgtgtgcacaggcaaggcactcggtgtgtgtgtgcggaccccagggtcccaggtcatgtgaagcgtacgtgtgtgtgcattgtatgtgtgtgtacattgtgtgtgcattgtgtgtgcatgtggccaaacagatgtgacctcccagaacacagtacccctccacctctacccgagctcagacagccgagctctcccttgtcctgtgtgtgtgtcagtgtggccacgtgcgtaaccccaggtgggctgtcctgagctgggggcctgcctgtcccttcccagaacgcccctctgcaggacaggaagtctgccccaagtctggccacggccctcctgctcccatctcgggctgcttgggagacatcagagcaggccccagcccccagtcccctcttccggccgcctggacaggacccccattcagcccaggtgtttccggaagtcccacggccttggggccacaggagaagrgttgaagcgtggctggggcaccactccccccacctggagtggcattgggcccacagctgcccatctctgggcctcaggtggaccaggggatctctaagggtctgctgtgccctttctatgcgtcctccacatcctatgatgtgcctgcttgttggctgctgtctgtgtgcgtcctggcatgttgtctggaggctggtgtcttttgcatgttcttggacaaatgtgtgctacctgcccaggcgcctgcaaccattgagcccacatgtgccccacgtgtgccctgcgggtggtcccgggcctggccagggctcagtgctcctcttccccctcctccctgttcccacccctcatgaagcacatgcgtgtccatcccatgtacccgtgggtcgacgcacgctcttgccacgccctgagcgtgtacacatgatgtgttctatgcattcaccctgccccccagcccgccctgcagaggacaagatgggtggccccggctccctttcccctaaccgcccctgcccgctgtgcagccgtgtgcgttggcgtgtgtttctgtgtcactggcgtgtcacgtgatgtagccgtgtttgctgacatgagcccctrcccccttctctgtttctccgttggtttctagagctctctccctccccttctcagaggggacaggactcctggggyctggctggggcccagagccaggccgccctctcctgttagccctcagagtcccatttctgttagccctcagagtcccatttctattggtgaccaacttgcaaatggataaaacacaggaaaatcctgccccccccttcctccctgcatgtcctgtccccagagccccccaccccaccctgggccaggtcaggccctgtgggacgggagaaatagcaaccaatccaacagcgggtgtgccgtgtgctcacttccttctgtccccacgtgggatgggcgccgtggggaggcggacatggggtggggggatgggagggagagctggacagacagatggacacggtcgtggatgaggcttttaatccggggtcagccaggtacagcattggggacatccccaggcccagggctggcgatgtgctgggaaggaacttaggtagagaggtgggaagtgaaagcatagggaggccatagccctccagaggggaattctaagacagacagttgaaggtgaggcctttgaaaaacaatgggaacatcacctcccaaagagggactgaggtggctggaggaaccagagccgcctctgcactctgcaccgagggtcgcgtgtggctgtcaggagagcagcgtaagcctgtggagcctctgctcgcttcctgctcagaaagccagaagagagctggggcaggccaccagggcaccagacactcaccaagcggccatcaggactgggatgagaggacagaggaaggacactctgtccccaaaccctcccgtgtcctgacggccctagaacttggaggtgtcaggacacaacacagactcaaggctcctggattgaaaatgtggagggcttgggccaggcgcggtggctcacacttgtagttccagcgttttgggaggcccacgtgggaagatcacttgagcccaggagttcaagaccagcctgagcaatatagtgagaccctgtctctaaaaacaacaaaaaaaagccaggtgtggtggcgtgcacctgtggtcccagctgttcaggaggctgaggcaggaggattgcttgaacccaggaggttgagggtgcagtgagctatgatcacaccactgcactccagtctgggtgacagagcaagaccctgtctcaaaaaagaaaaagaaaatgtggagggctctacgacaaggacagccattctggccccagagccctgcctcctgctctggaatgcagctgtcccttcccgtccagggtgtgagggctcgggacctgggtggatgtgctgtatctgggcctccaggccccagccccaccgtcactgggctgaacccgtagcggcctgtacccagagaatggtgcgggtccggctatcctcccacgagaacaggggctcatagccgaaatggcgctgagccttgtcggtgctgacggtgaaggtggtgttggccacggccagcgtgtaggggttcagcaggggtgcgtagagcaccagtggccgcagcagccactgcagcagggcattgagggcagccaggaacaccagcagccagtagggcagcaatgggcgggcgcccaccagccgcagtccgcaggggcccaggaactccatgttgaaatcctcgtagctcctgtagggtgatccatcgtagcagaagtatacctggccgcccatcagggctgcccgctgctccagctcccgggctgccagcacgtgcatccaggcaacattgcctgccggtggcggaagagaggcggacacacccctgagtgcccttgcaacaccacatcgaggctgctctcctgggccaccccctctttgggcccaggtagttgccgcccacatccccacagcagcctgggaaaggctgccttctccctcgccctggtagtcacttgctctcctgggccagcctgcatctgcaaagaacctggggagaggatagagaaaccaggacctgcgtggtgggccctgagaggcttggggactgcaggatggagtggcaggtgaccttattccctgtgtagatgctacttcctttaaaaaaagttttagagacagggtctgtctctgtcatccaggctggagtgcagtggtgcggtcatagctcactgcagcctccaactcctgggctcaggccatcctcccgcctcagcctcctaaagtgctgggattatagatgcgagccactgaacccagcccttttagtgctgtgtacacactgtccctctcctctcctctcctggggaatggctgctcccatagctgcaatcttctctgtagcctatgatacactttttaatgtcccaacttgcatggatcctgtattctctgcaggctgtggagacataatcacagtctaccttggcccatgtatagaccatatttttctagccagagtccacacttctctcccagggccatgtgggtcctgcccccttctagagcaagtcctcctgccatattctcagcctccccctgcctagcccagtcctcacccacatagacccggccatgctccacagaggccgggatggcccggaagagccaacctcccaggcgcaggccctggcggtagaagtccctcatgatctggtggccttcaccgtagatgcccgtgggacgaagggcacacgtcaccaggggcagccccccacggacctggtggcaaaggcaggtactgctgagacctgggacccgacagcttgctctcggccccggcctccttgggctggcagggtaagggggtgtgcagggcaggagccccatctctgcgcctcctttttctgggctcaccttcctcccgttggcctccaggaccagccactcggccagggccttgctgcaaggataggggtgcctgtgcactgcttcgtatggggtgtcttcgttgcccctggtgggaggagaaggaagactcaatgctgagggaaatgggctcttagaggacaagagggcctgccactcacctgtagaaggggtgacctttggtgttaggccccacaacttccatgctgctggtgtagaccaggaaccgtgttccggtctgcacacaagcctcgatcacgttccgggtacctggcagaggaggaggcgtatccaagctgcagcttcttccctctctgcatcttcctcctccccatcccaggtccagggaaaaccatgacaggtcaggggaggcgggggcagggctgtcaataggacaacttgtcccaggggagtcaccggaggtcaaggccaaagacagagtggggaacaaacaggcaagatggccaggagtgtccagagctcctcaccctgcacgttgacctcatggatggtcttgggactggccctgccaaacacgtctaccagcccagccgtgtggatgaccacatgggctccggccacagctgctgccacctcatgggcctgggtcacgtccccctggatggcagtcaccctcacaggccctggccggggttggaggacacaggccatgtcagagctggggccagaggccagaggctgggttcatcttccaccctggagtcacgttcccaatgtgactcactcgacccatccatgtggacagaaaccagcatcatctgttccactgcaggggtggggatcccagcttgggaagggttggggaagcgtccacaccctctccaccacaagctcccccaacaagaacctgtcttcagctcctccagccagggacccaggtgttggtcaaagacccgcagctccccgagccggggctcccgctgcagcagcattcgcaccacgtgctctcccaggaagccacagccccctgtgaccaggtacaccagcttctgggcctgtgcagagtcggccatgcctggctggggaagagaccttggctcatccaggggctggctgccacctgctgcaaccacctgttactgctggaggtgccctggagcggtgacgaggctggcgtttggcgggagggcagagctgatcctgggagctgcagcaaccaggccacctgccgtctgcccctgctgatggctgagttacggagagaggggcgggcttggggtgcaggaaggggtcagggtttagggagagagatttgaaggcagtaaaagggtggggaggccaggagttgagggaggtggagggaaggttataggaaggtgggaagggccggatggagggaaaggccacctgggcactggcagcgcctctgcctacctgcagccgctatcccagggtgcccagactggcctggaggggccctcttctttcgtccagggctggccggcccgcacaccgtccttccgctggctcctccttctccctcctgccccattccaggaacagagacccgcccagccacaacccccaccactcttgccccaaggcgccccctggcggccgctctgtgctccactggcatctgggtccagcggagaacttggtggggatgaagctcgaacttgcagagtgggctgaaggggtctggggctgtgggtggagccagcggtgacctcatcccacagtgtgacctcaggccttccctcctgctgggcttcccaggaggccggaggtccagctgcagctgtgattgtaggaaggggaggcctgaccttggcaccaccctggcgggcactggtggggtattcctggtgcgggtgcggctgctgcagcctgtcagggggtccgagacagtctcggactgtctctgcaggtctgggctcttgcctgaaggcccctttacctgccccacacttcaggtacccacttttccctctcttcaacttgcacaaccctccgtgccctctacccccaacccctcgctcctgcccaaatacaccgaccaaacacttttgtacaataaagtttaatcacaattataaaaatgtggcgtcgggtttgcgctattaacatatgtacagtccagcccagcaaaagggacccaccccgccatcctggcctggctgagccggggagtgacaccagggtggaagggtgaccctcagggtctggcaggaacagatgaggcagggttccaggcacggagtccccaggactgggggtgcagagcccccccagggggagaacatggccactgccccagagacccctaaactggggaggggtacacgcagggcgtaaggggaagtccccattaacacaaagcgagaggactgtgtagccccccaggacagaatctgtacaggccggcaccccaggtttccacaggaaacagctgctggctgctacaaaacatttacagcttcttctccgcaaagaaaaacaatcagggggtggtgggcaggggcgacaggagaggcagaagctgcctccagggactgaggctccctcgctgggcttggggcccccaaccccacgcttggagatgggggcatgtgggccctgctgagcccactaaggctgggggggtgctgggagctcagggcaccagggggaataaataggggtgtgggcacccatcctgccccacctcagtttagggagccccggcagctctctgtgccacacagacacgggatcttgttgtcttccagtgggaacttgtagtcgtaggtgatctcctcgtccacgccaatgggctgcttggagtagatcacgatcttcttctgggactcgatggtgatgaccttggcgtagcagttaggctgcggatggaagggcgtgtgagccgtggccacccccaccgacccccaactcctgccccggctggcccctggcgcaccgtgcagcagtggttgatgaatctggccaggttgccacacttggtggcatcgatgatggtgtcgtggtccacccggaacaggtagctgctgccaatgccctcctgcacgtagcgcttctcccgcatgtcggccaccatctgccagggtgagatgcgatggtcagggaagagtcccccacttcctgcccctgagcacgcctgccagccagcaccccaggtccacgcccaccaggcctggagctgcagctctgcctccagctcccgctaacccggcactgactctctcgactctgcttccaggagccctccctctttggggcagcatcctaagcctctggtggccattctaagtcacccgcagggaactccagggaaatctgcactgggtaagagagccactgactccttcgagcatctgcctggtcacagtggggtcccggactgctggggcaagtctggggttggggcagctcctgaaatgactggccatgtcaccaacggcaccctgctcatctctc

SEQ ID NO: 97374 - DNA, 28603 bp, Homo sapiens
ttcctaatccagaccacacgtggtttattgatggtagttcttcaaggccaaatcgtcagtcaccggcaagggcaggatatgttgtggtgtcttccacatcggtcactgaagctactgccctgcacccttccattacctctcaacaagccgaactcattgctttaacccaagatctcacccttgtaaagggactatgtgtcaatatctacactgattccaagtatgccttccacatcgtacattaccatgcagttatatgggcagaaagaggttttctcactacacaagggtcctccatcatcaatgcttccttaataaaaatcctccttaaggctgctctactgcccaaggaagccagtcattcactgcaaggggcctcagaggttaccagatcccattgctcgaggcaacgcttatgctgataatgcagcaaaagcagcagctagtattcccacatctgtccctcatggccattttttttccttctcatctatcacttccacctattctcccactgaaactattacctatcaatcccttcctactcaaggcaaatggttcttggatcaaggaaaattcctccttcctgcttgacaggctcattctatcttatcaccctttcataacctcttccatgtgggttacaagccaatggcccatctcttagaacctctcatttcttttccatcatggaaatccatcctcaaggaaattacttctcggtgttccatctgctactctaccacccctcagggatatctcaggccccctccctttcctacacaaaaagctcgaggatttgcccccgacccaagactatcagattgactttacccataggccccaagtcaaaaaactaagataccttttggtctgggtagatacattcactggatggatagaggcctttcccacaaggtctgagaaggccaccacagtcatttcttccctcctgtcagatataattccttggtttggccttgccacctctatacagtccaataacggaccagccttcgttagtcagatcactcaagcagtctcccaggcccttggcatccagtggaagcttcatgcccctactgtcctcaatatttgggaaaggtagaaagaactaacagtcttattattattattattattattattattattattattattgttacattaggttctagggtacatgtgcacaacgtgcaggtttgttacatatgtatacatgtgccatgttggtttgctgcacccgtcaactcgtcatttacattaggtatgtctcctaatgctatccctcccccctccccccagcaggccccagtgtgtgatgttccccaccctgtgtccatgtgttctcattgttcaattcccacctatgagtgagaacatgtcttgtttggttttctgtccttgcgatagtttgctcagaatggtggtttccagcttcatccatgtccctataaaggagaagaactcatccttttttatggctgcatagtattccatggatcatatgtgccacattttcttaatccagtctatcactgatggacgtttgggttggttccaagtctttgctattgtgaatagtgctgcaataaacatacgtgtgcatgtgtctttatagcagcatgatttataatcctttgggtatatgcccagtaatgggatggctgggtcaaatggtatttctagttctagatccttgaggaattgccacactgtcttccacaatggttgaactagtttacactcccaccaacagtgtaaaagcggtcctatttctccacatcccctccagcacctgttgtttcctgactttttaatgatcaccattctaactggtgtgagatggtatctcattgtggttttgatttgcatttctctgatagccagtgatgataagcatttttccatgtgtctgttggctgcacaaatatctccttttgagaagtgtctgttcatatccttcacccactttttgatggggttgtttgattttttcttgtaaatttgtttaagttctttgtagattctggatattagccctttgtcagatgggtagattgtaaaaattttctcccattctgtaggttgcctgttcactctgatggtagtttcgtttgctgtgcagaagctctttagtttaattagattgcatttgtcaattttggcttttgttgccattgctttcagtgttttagtcatgaagtcctagcccatgcctatgtcctgaatggtattgcctaggttttcttctagggtttttatggttttaggactaatatttaagtctttaatccatctcgaactgatttttgtataaggtgtaaggaagggatccagtttcagctttctacatatggctagccagtttaactggcaacatttattaaatagggaatcctttccccatttcttgtttttgtcaggtttgtcaaagatcagatggttgtagatgtgtggtattatttccaagggctctattttgttccattggtctatatctctgttttggtagaactaatggtcttttaaaaacatacctcaccaagctcagccttcaacttaaaaaagactggacagtacttttaccgtttgccctccttagaattacagcttgtcctcgagaagctacagggtatagtctatttgactatatggacataccttcttgctgggcccccaccttgtgccagacaccagccctctaggcgactatcttccagtcctccagcaggctagacaggaaattcaccagcctgctaatcttctcttgcctactccagattcccagccatatgaagacaccctagctggatgatcagttgttgttaagaatctgatccctcaaactctacaaccgcgatggactgcttagtcatctatagtaccccaactcccgtccacctgcaggaccctccccattgggttcaccattccagaataaagctgtgtctgtcagccagccagcctgatctctcttcttcctcctggaagtctcaagcactctcccctacttcccttaaactcactcgcatttctgaagaacagtaatagcccttataaacctaacacatcccttcattctattaggtctattcgtccttaccctactttttgcaacagggctttatgaagtcatccccactacttggactgtgcccccaagacttgtcatccctattatcttctgtctagtcatacacctattcatcattctcaactactcgtaaatgccctgcccttgtttacgctgccagtttaccagtttacacttttcctccaagtcaccataactgatatctcctggttttacttcaaatagccacccttaactctcttgcagtggatataatatcttcagtggcaagatacattccaattctcctatcctgataagtctttctttttttttttttttttttttacttttctactcactcttatccttgcccctattctccagtcactctctacctctccctagttacctccagcatagtatcaacctcacccactctctcctcactgcctccaatccttctctagtaaaaaattgttggctatgcatttccctttcttcctgctcttatgcagccgtccccgctctacaggctgactgagctacctctcctgtctccctacacctctgaaccttctttaatagcccttgtctttacccacctgaggaacttctttactttctagacagatttggtgagaactccccagagatttcgcattaaaaagcggccacacttctccgcatctacttacggcacctttctctttatgtcaattccactcccccccatatttggacccctaaccacacaaacaactatccctgttgctgctcctttatgcttctcccaaaaacagcctactggaatccctttaggaaaccttccaccatccaaatgttcctttactctttatctccagaaccaagccacacacactaccaaacagatgggagcattccaacttcacattactgataagctctctatcattactgacaaactaaaaaacattggcagtcactaatgcttaggaagacacctaccctgcatctcactccatctttggctaccctcgccctgctcatttgactctcctcctgacccctcctcttgcttgcttatacccagccccatgaatagtagtgaaagactactcacagatactatgtgctttcttatacaccatgagaactgaaccttccctctacgcagttgcaccatcaatccccattacaacctctaatggctgctgcctttgctggatctctaggattttgggtgcaggacccctctttcactacaccctctcaccttttcactttacatttccagttatgcctgacacaagctctcttatttttctgtggttcttccacgtacacctgccaactggatgggcacatgtactctagtcttccttacccccaaaatccagtttgcaaatgggaacgaacaactgcctgtccccctcatgacaccaacatgacaaaaaagagtcatcccattaatccctttacttgtgggtctaggaatttctgccttcactattgcacttagaactggaatagcagctatctcaacctctgtcacaccattctgcagcctctctaatgacttctctgtttagcattacagatatatcacaatctttatctgtcctccaagcccaggttgacactttagctgcagttgtcctccagaactgccaaggcctcgatttactcactgctgaaaaaggaggactctgcatatttcttaatgaagagtgtttgtttaactttaatcagtctggcctggtatatgatgacgtcaaaaaactcaaaaacagagctcaaaacctcgctagtcaggcaactaattatgctggacccacctggccactctctaactgggtatcctggcttcttccaatcgttagttctctaatacctgtcttcctccttctcttattgagggcttgtgtcttctgattaatctctcaattcctacaaaactgcatccaggctatcactaatcactctatacaacaaatgctgcttttaacaaacccacaatatcaccccttaccccaaaatcttacttcagtctaatctctcccactttaggttcccacaccaccgctaatcctgctcaaagcagccctgagaaacgtcacccatcactcctccatacagccccaaaatttcaccccaagttttcactattcttattttatttattatttttatttcttattaacataaaaaaacaggaatgtaaggtcctctgagctggccgcaccatggtcaaaccattgtgacatccccggcccttgtgataatgtactttgtgatattccttgtcctgtgaatgtacattgtaacattcctccccacccttgtgaatgtaatttgcaacaccctccctgctcttctgaatgtactttgtaacattcctcccatcccttgtgacaatacaccctccgcgcccttgtgaatgtactttgtaacatcctccccgcccttgtgaatgcactttgtaacattcctccctgcctttgggacaagacatcctccccgcccttgtgaatgtactttgtaacatcctccccactcttgagaatgtacttcataacatccatcccctgcccacaaaaaaagtcgctcctaactccaccgcctatcccaaacctataagaccaatgataatcccaccatcttcactgactcctttctcaaactcagcccacttgtaccctagtgaataaacagccttgttgctcacactaagcctgctcaggtggtctcttatatggatgcatgtaacattactgtaaaatgagatcttgcggggtgcagtggctcatgcctgtaatcccagcacttcggaggccgaggtgggtggatcacctcccaaagtgctgggattacatgcatgagtcaccatgaccagccaggtatttctttataacaactcaagaacagactaatacacgtgactatttccagactattttgtaccaatagtctagttgtctgtgtacaatgcaacagcatcttaattactatagttttaatcttgatattcattagggcaagttcttccaccttttttatcagctgggtcttgattatccttgcctattgttcttccatataccttttagaaacagtatttcaagggcgggtgtggtggctcacgtccataatcccagcactttgggaggccaaggtgggtggatcacctgaagtcaggagtttgacaccagcctggacaacatgatgaaacttcgtctctacaaaaaaaaaaaatacacaaaattagctgagcttggtggtgcatgcctgtgatcccagctactcgggaggctgaagcaggagaatcacttgaacctgggaggtggaggttgcagtgagtggagattgttccactgcattccagcctggggaacaaagtgagacttcatcccaaaaaaaaaaaaaaaaaaaaattcttattgcttctttcagtgatttcccttttttttttttctattctctcattctagaatgccttgtagctggatattgaagctttttgcttatctcatacattatttaatttacatcctttccagcacttttctttttaggctgaattctgtgaaacattccttggcttagtctttgagatctttcttctttttgaatttgagtagttactgctatgagttgccttcttttcactactttcactgtatctgtccattcaggctgctataacaaaataccatagactggtggttaataaacaacataaatttatttctccgagttctggagattaggtcaaagctcaaggtacagtcagattcagtgtcagatgagggcccttttcctggttcacagagagccatcttcttgaagtaaccaaatacagtagaagtggcatgaaatatctttggggtgtcttccatgaggggggtaatcccattctgcagagccctcatgacttcatcatgtcccaaaattcccagctcctaatacaatcactttgggagttaagatgtcaacatacgcaagttgaggagacaaaatttatttatttatttatttatttatttatttatttatttatttatttatttttgacatggagtctcactctgtcacccaggctggaatgcagtggtgtgatcttggctcactgcaagctctgcctcccaggttcacaccattctcctgcctcagcctcctggataactgggactacaggcacccagcaccacactgggctgattttttttttttttttaagtagagacagggtttcaccaccttagccaggatggtctcaatctcctgaccttgtgatccacccaccttggcctcccaaagtgctgggattacaggtgtgagccaccgtgcccagcctaggagacaaaatttagactacagcaacatctcataaattttggtatgccatgtctttgttttcatttgtctcaagatgttttctaatttaccttgtgaattcttgcttcacccattgatagatcaggagtgtgttgcttacaataaaatgtatttgtgaattttccagttttccttgtttttcatttcttgtttcattctatgtgacttgaaatggtactttgtgtttcagtcttttacatttcattaagatttgttttgtggcctaacacatggtttctcctggaaactattccacatatgcttgagaaaaatgtgttctcttctgttgtggggtgggttgtgccaactgttatatagtacttgtcctgtttccttcttgatattatcgtggctgttctacctattaaattgaaagtggtataatgaggtctccaattgttatgcagaattgtctatttttccctttaattttgccaatatttacttcatgtattttaagctctgatgtttgatacatataatttttttatcttcttgatgaattttaccttctatcagtatatactctcattcactctctcttctatcagttttttacttcaagtttactttgtctgatattaatatatccaggcaaattctctttaggttactatttacatggaatgatctttttccattatttaactttcaaccttttttgtctttagatctaaagcgaaggatggccaggcgtgatggctcatgcctgtaatcctagcactttgggaggctgaggtgagcagatcacctgaagtcaggagtttgagacagcctggtcaacatggcaaaaccctgtctctactaatactacaaaaattagctgggcatggtggtgggtgcctgtaatcctatctactcaggaggctgaggcagagagaatttctggaagccaggaggtgaaggttgcagtgagccgggatcttgccattgcactccagcctgggcgacagagcgagactctgtcttaaaaaaaaaaaaaaaaaaaaaaagcaaagggcaacatacagttggattgtgtattttaatccattttgccaaattatgccattagattggagaagttatcccatttacccttcatataattaccaataaaaaagactcattttgccactttgttactctttttctgtatgtcttacagctttttggtccctcatttcctacattactgccttttttgttgatttgtttttttagtgacatctttttttcgtctcattttgtgtatattccattgatattttatatgtagttaccatggggatttttttttctttttttgagatggagtatcactcttgytgcccaggctggagtccaatggtgcgatttcgagtcactgcaacctccacctcccaggttcaagcaatcctcctgcctcagcctctcaagtagctgggactacaggcatgcaccaccacacccagctaatttttgtatttttagtagagacggggtttcaccatgttagccaggctggtttcaatctcttgaccttgtgatccacacacctcagcctcccaaagtgctggaattagaagcatggcctggtgaccacggggattaaatataacatcctaacatccactgtacagtccactgtccagtcctcactcctcccacatgctgttcttactaaaatatagaaaaaattctactagggggaattttaaaagcaattaaacttttcaaccacagaaaatttactgtccatgacaagtcgtcatggacagtaagacacatagaaaggcaatctcattttcatgtcatttatttcaatttctcctctagtatgatcttgtgtacagtaacagtagtatctgaaagcttcccataactcctcagattcatagtttattcttccagtgagtattttcagaggcacttaaggaatatgtactgctaaaagtattaccaggccgggcgcggtggctcacgcctgtaatcccagcactttgggaggccgaagcgggcggatcacaaggtcaggagatcgagaccatcccggctaaaacggtgaaaccccgtctctactaaaaatacaaaaaattagccgggcgtagtggcgggcgcctgtagtcccagctacttgggaggctgaggcaggagaatggcgtgaacccgggaggcggagcttgcagtgagccgagatcccgccactgcactccagcctgggcgacagagcgagactccgtctcaaaaaaaaaaaaaaaaaaaaaaaaaaaaaaaaaagtattaccagattttttttttttttgagatggagttttgctctgtcacccaggctggagtgtagtggcaaaatcttggctcactgcaacctctgtctcctgggttcacacaattctcctgcctcagcctcccaagcaattgggattaaaggcacccgccaccatacttggctaatttttgtatttttagtagagatgaggtttaaccatgttggcaggctggtctcaawctcctgacctcaaatgatctgcccacctcggcctcctaaagtgctgggattacaagcatgagtcaccacgcccagcatattctcatattttcacattcatatagcttgtttgcagtgtgggttttcacaagtatagtaagacttgtaaaatggatgcaacatttccctcattctgtattatcaagatttctctccagtatgaattatcatttatattaaaggatgaaataatacataygtgtgtgtatgtgtgtgtgcatatatakgtgtgtgtgtgtgtgwatatatatatatatatatatatatatatatatatatatatatataaagacattcccatatttctaacattcataatgtttctggcctctttgagattaccaaatattaacacatgagacagaagtaaagatttcccacatcttaccttcatagagtttctctccaacgcatgttgactgacttagtaacactggaagaattcttaacacatcttaaattgatgaggtttcttatatctgaaactgtcagaaatttctgaaggctgtcccagatttcttacatatataggctatctgcccactgtgagttctttgatgttgagttattaaaaggcataagtgaagatcttgtagcctttacatttgtagggttttataccactgtgaattctcatgtagatattaagtcctgagcactaagtaaatgttttatcacattccttacatacagagggtttttctccagtgttgattatgaagtactatgaaggtttgtgaagtattttaaggctatctctcattcttaccttcaattggcttttacagtaatttttgttatgaaaaataaacaatatgctgggtgtggtggctcaagcctgtaatcccagtactttggaaggccaaggcgggcagatcatgagatcgggagatcgagaccatcctggctaacatggtgaaaccctgtctctactaaaaatacaaaaaattagctgggcatggtggcacatgcccgtagtcccagctactcgggaggctgaggtgggagaattccttgaacccaggaggcagaggttgcagtgggccaaggtcatgccactgtactccagcctgggtgagagagagagactctgtctcaaaaaaaaaaaagaaaaataaacaatagtggaagaaacaaaggctttaccacatgccttagaaccagatttttctcccaaaggtgagttcttacactttataagatgtgaagaattactactcttgcctattccttatatcactgggacttgtgtccatgttaaattcattcctattatataagatatggaaattcagtgaaggttgttcatattctttaccttcctatgatttttttccagatgagtttagatgtaaatactaagatctgaggaacacttcaggttttttcacatgccttagttcttagatgtttagcaagtgctgaagattgagtgaagtttttcccacatttcttacattcatatggttttgctccagtgtgagttcgtgtgtgaacgttaaggyatgtggaatacctgaaggctttcccacattctttacatgcataaggcttttctcctgtgtgcgttcgcatgtgcatattaagatttgtggaacgagcaaatgctttaccgcattccttacattcayaggccttttctccagtgtgagttcttaaatgggtactaaggcccgaggattgagtgaaagctttcccacattctttgcattcatatggcttctctccagtgtgaatccttacatgttgactaagcattgaggaattattaaaggctttcccacattctttacattcatagggcttttctccagtatgtgttctcatgtgtaaaacaagtcctgaggaacgagtaaaagctttcccacatgccttacataaatacagcttctctccactgtgaatccttacatgttttgtaaggtatgaggaatgaataaaagcttttccacactccttacattcatatggcttttctccagtgtgaattcgcatgtgtaaaataagtcctgtggatctagtgaaggcttttccacattccatacatacatagggcttctttccactgtggattcttgtatgatcagtaaggtatgaagaatgggtgaaggctttcccacactctttacatttatatggtttttctccactgtgagttctgatgtgtaatttaagtcctgtggattgagtgaaagctttaccacattctttacagacatagggcttctctccactgtgaattcttccatgtcctataaggtgtgaggaattactgaaggctttcccacattccttacatacatagtgtttgtctccattgtgagatcttatatgtaacttaagggatgactgattaagaaaagttctccaacagtctttgcattcacacaatttctcttgtgtgtgagttttattctgcctagtaagatttggaaactggttgaaggctttttcatgtttaacacacttaggcattttcccctcagcatgacttttcttgtaaaaactatgaggaaagttctttcttaaggcttttccactctgattatcctcagaagttttctctccaatgtgagttatcatgtgagtcataagaaatgggtgttcattgaagacttttccagaatggttagagtcatacagtttctctgcagtattgcttctctcctgttgagatataaaagatgaataaagaatttctcacattcagtatggtaacagaatttctccccaatcacaacatatatgcattggaaatatatttaaacattttaacatatccattatatgtacagagttccagccccatttttgagttaagttgagtaataggacaatgaggccaccagcctgcctatattctctgcattcacagagcttcttagacaatctgtctgatatttatttatttatttatttaagaaagattctcactctgtcacccaggctgaagtgcagtggcacgatcttgactcacagcaatctctgcctcccagttcaagggattctcaggcctcagcctcccaagtagctaggattacaggcatgtgccactatgcccagctaatttttgtatttttagtaaacacagatttttgccatgttgaccaggctagtctccaactcctggcctcaagtgatctgcccgctttggcctcccaaagtgctgggattacaggcattagccacaatacatctgagaattatttagactaaattatgggctgggcacagtggctcatgactgtaatcccagcactttgggaggccaaggcaggtggattgctttgagctcaggagtttgagaccagcctggacaaaatggtgaaaccccatctctacaaaaaaaaaaataatcagccaggcatggtggctcatgcctgtagtctcagctattcaggaggctgaggctggaggatcatttgagcccaggaaacagaggttgcagtgagccaagactgcaccattgcacaccagcctgagcaacagagtaagaccttgtctcaaaaataataataaagtaaaagaaattatgcacaaaaaactgaatagctgagttgtatgtttgtggatgtttatttgtgagatctctgagaagaaatatgtttgtagtaagtttagagtgcttcccatattcatgatattcagagaatctcttcagactttgttttctctgggtaaatgccattttcctcatataattttcatgaatattgtgcttcttgtcctagtgtggaagatttcatcccttggaaatcttaccaattgtactccatttggtgatctttctgcagaaatatcttgcagcagtggggagcctttggttttgagttgcaaatccaattctgaaataaagtgaaaaatgcagcttgggagaaaaattgtggaataaagtcgtttaaaagcctatggggctgggcgtggtggctcacacctgtaatcctagcacttttggaggcctagataggtggcttacctgaggttaggagttcaagaccagcctggccaacatggtgaaacactgtctctactaaaaatacaaaaaattagccaggtgcagtggtgcatgcctgtaatcccagctactcaggaggctgaggcaggagaatcacttgaacccagagggtggaggttgcggtgaggtgagatccaccactgcactccagcctgggctacagagcaagacttcgtctcaaaaaaaaaaaatgcctaaggaacagacatagcataatcaaatgtggcagagtgaagaactacagggctctttcctaccacaatatgactaataagttcagaaaacctatcagaatcaactgtgctgggctgggtgtggtggttcatgcctataatcccagcactttgggaggtcaaggtaggtggatcacttgagttcaggagttcgagaccagcccggccaacatggtgaagtgctgtctctactaaaaatacaaaaattggccagacatggtggtgtacacctgtaatcccagctactcaagtggctgagtcatgagaatcacttgaaaccaggaggcagaggttgcagtgagtcaagatcatgccattgcactccagcctgggtgacagagtgagactctgtgtcaaaaaagaaaaaaatatatatatacatatatatatagctaagtgaaagaagctagagagaaaaggttacattgtatgattccatttatataagatatacagaaagggtaaatccgtagagagagaaagcaaattagtctctgtagggtgagtggggactgactacttgatgggtatatggtttccttttggtgtgatggtaatgctttgaaactagaccaagcacactggctcatgcctgtaatcccaacactttgggagacggaggcaggtgggtcacttgaggtcaggagtttgagaccagcctggccaacatggtgaaactccatctctatcaaaaaacacaaaaattcaccaggcatggtggcgcacgcctgtagtcccaactactcagaaggctgaggcaggagaatcacttgaagccaggaagctgatggaggttgcagtgagccaagatggctccactggactctatcctgggcaacagagagagactctgtctcaaacaaacaaacaaacaaagaaatgccttgaaactaaaaagagctgatagctacacaacactaaaatggtaaatttttgtatattttacctaaaaaaagtatatggcacatttgtatatctttccaaacatgcataaaacatgattaaaaaaaaaaagagtgaagcaaatggaaagatggactataaagagtttggctatgtcagaagttttgcaatggtaaagatatggtgtcaaaactatcactacacctgtaatgccagcactttgggaggctgaggcaggtgaatcacaaggtcaggagttcgagaacagcctggccaacatagtgaaatcccatctctacaaaaatacaaaaaattagttgggcgtggtgtcaggtgcctgtaatcttagctacttgggaggctgaggcaggagaattgcttgaacccaggaggtggaggttgcagcaagccaagatcatgtcactgcacaccagccagggcgacagtgcaagactccatctcaaaaaaaaaaaaaacctgtattacttattatccaactaataatatgcagaaaactgaggctggtagtaagcaaaaagatgggagaatcaagaaagcaatataagaaggtgttggcaaaggacctacatgcataagatggaattttcaaataaggcagacaaacctttctgagaacagaaaagaggttgagaagatcaatggaaatttaaagatgaggggagttgaaagtatctaaggaaaccaaatggcctcagccttctcaggaagaagagtataccctgagaagttcgcaaagtaacatttccaatgtactgcatgtctcctagggtggcacagcagtgccataataccacatctgcttatgaactcaccctgcagaactcctgtcactcctgtcctcagctcttccatttgttccaatccagacatgagactacgtttgaataattcagaccctgctggagggaaaaatgcacaaaagaagaggcccatgcaagacataacaccatgtccttcaatggggaaccaatacttttgccttcggggattctaaagatggtcaagtgtaactttacaaatagcaaactaatcatataacatttccaatacatgcactaaamctatttttaaaataacaaaaatgttgcccaggtataatggctcatgcctcatacctcagcactttgggaagccaaggcagggagatcacttgaggttaggagttcaagaccagcctggccaacgtggtgaaacttcctctctactaaaaatacaaaaattagcagggcatgctggcacaggtctgtggtcccagctactcagaaggttgaggcagaagaattgcttgagcctggaaaaccaagtccaacttcatacacatttaaagtcttaaagtttttaatccatacattaaataaactcatttacttaaatctttattttcatggggaatcctctacaccaggggtgtccaatcttttggcttccgtgggccacactggaagaagaagaatggccttggaccacatataaaatacactaacactaacgatcgctgatgagctacaacaaataaacaaaaaaactggtctgtgcataaatctcataatgctttaaraaagtttacaagcttgttctataaagtaatgcccaggccatgcatggtggctcacgcctgtaatcctagcactttgggaggccaaagcaggtggatcacctgaggtcagagtttgagaccagcctggccaacatggtgaaaccctgtctccactaaaaatacaaaaattagatggccatggtggtgcacacctgtaatcccagctacctgggaggctgaggcaggagaatcacttgaatccaggagggggggctttgcagtaagcagagaccatgccactgcactccagcctgggcaatagagccagactgtgtctcaaaaaaaaaaaaaaaggaatgtccactggccaaggtccatgcctgtcttgcttattacagtaccctcatttgacagcaaacatttaagaaacattgatttcctaaaggggtcagtgaagaaatgatgccagttttacctagtataatgagattcttgtagttctccaacatcacatctctgtagagatctctstgggcttgatccaacaaagtccactcctcctgggtaaagtccacagccacatcctcaaaggtcactaagtgctaaaccattaaatacatgccagcttcagctaagtaccatctcctttgatgttctgagaaaaatgcatgaaggactaaggaagactagaagcctgcagtactcccaggcctcaggcctcttctcctctatatagatattgtcttgcaatggcatccaatcccatggacttatcagcatcactgaaacatgactaaactgatcttcctacagctttacaatgggctcttctggccttagtcctcctctatttataggtgcagtctgcactgaatatgttgcagcactatgtaaaatctaataacaaatgaattatctccacagtgacacacaaattccttcagattagacatctccatccctttcttacaatctgtcataacactcagcaaaacaatgagccaacaagcatgattgaggatcagaaagaattagtaaacattgagataaaataatcatttctgtagggagacccactgaaactattgctacagaataaaagatgaaatgctcctgattactgtaaatacaaaattgcaygcaggattgtgtaaagacaatgccaggttggactgccagaatgagccaacagcgtgtgatgtgcttccccctgcacagagcctatgaatggacgtgcagtcagggaggtttcacatcaccaagattcctatcccagaaaagcagatgttcatagctctgggaatggaatgcgacccttgtggagagcctataaacagatgcatggggggtgcctgtccatatggataaacgccctcatcttgtcacggctcttgtaggcctctttaaagttaaggcatactcccttctgagaacttctggtctaaccagttgtctagcttcacatcctgtttccatggattgtttctaaccagcatttgtggcaattgttactgctgattaatatcttgctaatcataggttatggaaagattgtgtttctgttttaaggctctgttagaaattactgacacacacactatattttaaattcttgtctctgtatactgtacttctacatacaaatgtactgtacttctacatacaaatgttatgttaaagaattacttcatccccatgtgaccatctcacctcataatcaaatgaccctaaatccctcactaacctacccccgccctcactaagcttaataataactgctggtatatccagtgcattgttggcactgtgggaccagaaggcggtgacccccctggacccagccttcactatcttgtgtgtgtctattatttctcaacctgccaatctgcctgggaacaaagagagagccccgttgcactgtgggctgctggccagatcccgcaatacacttccattgcaatctctgtacaacctgagatggcttggttcctagagaaattcacctggggagttatttcctgagcaggaccatcatttctttaagatgcttgaatacacgataacaaggtaaggctaccgatgatggctacaagcataacattttgaagttaggtctgctttccacttgcctgagaagaatccatcagtaatccatcagtaacccagccactagccttggcttctcgatgttcctgtcatgaagacagaaagtgtcctggaaaaaatgacctttggaaaagaataatggcatgtcagttggatacatcaaagaaaaagtatttcaggctaggcatggtggctcatgcctgtaatcccagcactttgggaggccaaggtaggcgaatcacttgaggtcaggagtttgagaccagcctggccaacagggtgaaaccctgtctctactaaaaatccaaaaaaaccagccaggtgtggtggtgcatgcctgtaatcctagctactcgggaggccgaggtgggggaatcacttgaacctgggaggtggagattgcggtgagccgacaccatgccactgcactccagcctggctgacagagtgcgactccatcttaaaaaacaaaaaagtaggccaggcacggtggctgacacctgtaatcccagcactttgggaggccgaggcgggtggatcacgaggttaggagatcgagaccatcctggctaacacagtgaaaccccgtctctactaaagctacaaaaaaattagctgggcatggcggcgtgtgcctgtagtcccagcagctggggaggctgaggaaacagaatagcatgaacccaggtggcagagtttgcagtgagccgagattgcaccactgcactccagcctgggtgacagagcaagactccatctcaaaacaaacaaacaaacaaacaaataaagcatttccataccctgcattgcagacatagtcttttccatggcatgcctcccaattgtaatactattctgacacttaatactctaattgtccagggggtggctcatgcctgtaatcctaaccctttgggaggttgaagtagaaggatgcttgaggccaggagttagagaccatcctgggcaatatagtgagaccaagtctctttattaaataaataaataaacaaataaatatacatatatatatatacacatatatgaaaacaaagaataaaagaaaaaatactctagttgactttgcctagcaactatcagacagtaagaatacttttgtgtctggcttctttcagtcagcattatgctggtgaggtgcacccaagttgttgtgttcatccacctgtgatttggttcatatctttgctgaagaatatgccacagaggctgggcatggtggctcacgcctgtaatcccggcactttgggaggccgaggtgggcagatcgcttgaggtcagcagttcaagatcagcctggtcaacatggtgaaaccccatctctactaaaaatacaaagaaaaatgggtggctcacacctgtaatcccagctactcgggaggctaaggcaagagaatcacttgaaccaggaagacagaaattacagtgagccaagattgcgccactgcactccagcctggtgacagagcaagactctgtcacaaaaaaaaaaaaaaaaagccacagaaatatgccacaattcacccattctgtggatccacatttgggttgttcctaatttaggctatttcaaataatgtgataaataacttttacatttagcctggcacacgtatgcatgttgcatcaccaagtccatatttagttgtcactgttttaaaatgtagctgggcatggtggctcacgcctgtaatcccagcactttgggaggccgaggtgagtggatcacaaggtcaagagatggagaccatcctggccaacatggtgaaacccatcctggccaacatggtgaaaccccatctctactaaaaatacaaaaattagctgggcatggtggcatgcacctgtagttccagctactcgggaggccaaggcaggagaagcacttgaacccgggaggtggaggttgcagtgagccgagatcatgccactgcactccagcctggcaacagagcaagactctgtctcaaaaaaaaaaaaaaaaaagtgttctcttcagcaatgcatgcacatcttaaagaagacttgatattgtcactgactttagttatgcttttatttatttatttttttttttgtagagatggggtctcactatgttgtcccagcttgtctcaaactcatagcttcagtggctcctcctgcttctgcttcccaaagtgctgggattacaggggtgagccactgtgcccggcctagttttatttatttatttatttatttagacggtgttttgctcttgttgcccaggctgtagtgcattgccacgatctcagctcaccacaacctctgcctcccgggttcaagcgattctcctgcctcagcctcccgagtagctaagattacaggcatgccccaccacacctggctaattttgtatttttagtagagacagggtttctccatgttggtcgggctggtctggaactcccaacctcaggtgaaccgcccacctcggcctcccaaagtgccaggattacaggtgtttaagttaccgcacccggccaatacacattgatctacacaagagatgcaaagaaacagaaaacatgcaaaatattaacaaatgatcagtctacaacaaggatatataataggtgttcaatattctggcctttcacattttctttggtttagaatattcaatctacagatagcctgggcaacaaaccaagaccctgtctttaaaacgtaaataaataaataaaaatatatgagggggaaggccaggcgcggtggcttatacctgtaattccagcactttgggagtccgaggagggtggatcacgaggtcaggagttcgagaccagcccaaccaacatggtgaaaccccgtctctactaaaaatgcaaaattagccgggcgtggtggcacatgcctgtaatcccagttactcagcatgctgaggcaggagaatcgcttggaccgggagacagagtttacagtgagcctatatcacgccattgcactccagcctgggcaataagagcgaaactcygtctcaaaatatgtatatatacgagaggaaaaacgctgaatcaaaacatgtctctttcacagttaatacaactgtaatttctgatactggtataatgaaggcggcatcctacttcctggaagcccctccgttttgaagctctktgggaggtactgacctaggaagttcagctgcttttgatctcaaaaacacagcggagtattgctactttgctttataactgtggcaatatttgcttttatttctataaacctacaactcctgcacacttgacaaagcatttaactgctgagcaatttcgcaaacttcaataagcgatgcccycccacagccagatcatctcctccgtccagggctcaccggaacgcactgcaatcgccctgtcggtgacaagaggacgctggggcccttttccacaacagctgagatgcttttccttctggagaaaggacacaaaggttgactggctgcttttaaacagaggggcacggtggttggagaaaaaaacacgtctccaccggggaccctgggccaggcccagactgatgcgggcgcagcgggaagaggcgctcagaagagaaggcgggaaccccccgcctcggggtcctggcggggaggaggcgccgcttctccggagcagcagcgggaggccggcgcgtctcagaccyagcagaagtccggagcgtcaccctccgaccctcgctccgcctcccgctaggccctcctgccccgccctgcctaggttgagcatgagcgctggctgaggtgaaaacccagctaggaagctgctggagagcggggaatacgtatagctgcgcgccggctggcacttccgcttccggttgcgcacggcattaagtgtaggggccgagccccaagagctttggaatgaggatgatgtgaagctgagagaagagctggggccacctcttcgacacgcgtacagaaaagtcccgttttctcgcatcccaggtggaccaggatccagatcaatctgtcgatattgggaacgacgccggaccaggaaacccagcgccaagggccgggttggaggcggggactggcgcagcgggcggggcacgcgtggaggcgtcacctaaggcttcgattgcagacagcgggatgctcatcgagtgcttttcttttcttttttaatttctctttttagttttttgagataaggctccggtctgtcgcctaggctggagtgcagtggctcggtcatagatcattgcagcctggaattcctgcgctgaagctatcctcccgcctcggcctccggagtagcttggaccacagttgggcccatcacgcccagctaagttatctttttctagacacttgggtctcactgtgttccctaggctggtctcgaactcctgagcctaaaggatcctcccccctcggcctcccaagcagcttggaccacaggtgtgtgccaccacgcctggctaatttatttttattttatttttatttttttgtagagacagggtctctctttgttacccaggctgatctggaactcctgggctccagtgatccttccaccttggcctcccaaagtgctgggattataggcgtgagccaccaccctagggaaattcttttctgcaggattttctccttgtttcttcaaccctctgcagggatataaacatatttacaaagataatcccgctgtagtcctagctactgcgggagaatcgcttgagcccaggagttcgagaccagcgacaccctgtttgaaagattaacctgatggggctgggggcagtggctcacgcctgtaatcccagcactttgggaagccgaggcgggtggaacacgtgagttcaggagttcgagaccagcctggccaacatgccgaaaccccatctctactaaaaatattttttaaaaaatagccgggtgtggtggtgggcgcctgtaatcccagctactcgagaggctgaggcaggagaattgcttgaacctaggagactgaggttgcagtgagctgatacgatgccacagtactccagcctgggcgacagagtgagactccgtctcaaaaaaaaaaaaaaaaagattaacctgttaatccataaaatgctctgtgcctctgatacattcagttccttctttaggcctttagttttgttgtgatacaattatcatagcatacaattaacctgtttaaagtgtacagtttcgtggctttttgtatattcatatatttgtgcatcgatcatcacaatcaattttagaacattttcatgaccacaaaaataaacccagtaccctagccatgatcacccaatctgctcatccagccccacccccacccccagagtccaaagcaacagctaatctttctgtctgtatagattgcctactgtagatattgcctgtagaattagaatataaaacacgtggtgtttggcttgtttcattcaatgttttcaaggttcatccaattagcatgtatcagtacttaatttttttttactaaataagattccattgtatggctgtatcataacatcagttgttggatattgggttttctcttttttttttttttttggcttttttggataatacaagacgcattttaagcagtggtcaaaggaacattcatattcctaaacacttttgtcaataaaaataagaatagctgggtgcagtggctcacacctgtaatcccagcattttgggaggccgaggcaggcggatcacctgaggacaggagtttaagaccagcctggccaacatggtgaaacacggtctctactaaaaaatacaaaaaccagcagggcgtggtggtgcgcacctgtaatcccagcttctcgggaggctgaggcaggagaatcacttgaacctgggaggcggaggttgcagtgagctgagatggcgccacggcacttcagcctgggcaactgagcacaactgtctcaaaaaaataaaaaataaaaaataaatccccagctcaaaaaataaaacctagaaaaagaatataaatgtaaaccaaaatggaaaaaggtttatttatttatttattttttatttcaatagcctttgggaaacaggtggttttgggttacatggataagttctttagtggtgatttctgggattttggtgcacccatcatccgagcagtgtacaatgtacccaatgtgtagttttttatccacttttatccctcacccttctcccacccttcccccagagtccccaaagtgcattctttctttctatccttttttgttttgttttgttttttctttttgagatggagtctcattctgttgcccaggctggagtgtagtgacatgatcttggcaacctccgcctcccaggttcaagcagttctcttgcctcagcctcctgagtaagtgagattacagacatgcgccaccatgcttggctaatttttgtatttttagtagagatggggttttcccacgttggccaggctggtcttgaactgctggcctcaagtgatccacccacttcggcctcccaaagtgctgggataacaggcgtgagccactgcgcccacccaaagttcattatatcattcttatgcctttgcatcctcatagcttagttcccacttataagtgagaacatatatatggttttccattcctgagttacttcacttagaataatagtctctatccaggttgctcagaatgctatgactttcttgctttttatagctgagtggtattctgtggtgtatatataccacatttttgttatccccttattagttgatgggcattgagactggttccatatttttacagttgcaaattgtgggctgtaaacatgtgtgtgcaagtgtcctttttttttttcttttttgagatggagtctccactctgctgccaggctggagtgcagtggcctatcttggctcactgcaacctccgcctcctgggttcaaatgattctcctgcctcagcctcccaagtagctgagactacaggtgcacaccaccatgcccagctaatttttgtatttttagtagagacgaggtttcaccgtgttggtcaggatggtctcggtctcttgacctcgtgatccacccacctcagcctcccaaactgctgggaatacaggtgtgagccaccatgcccagcctgtttcagacatttttaagactatgtcccattcatttaaaatactatttttccccattgaattgttttgacacctttgtcaaccatcattagactgtaaatgtgagcttagatgttttaaatggagaattataccaaaccttccaagttcaaatattcccagtgctccataacttaagaacaatgaaaatgaagaaatacttcctaattccttttatgaagaaagtataacattgatataaaatgtggtagaggctgggcatggaggctcacacctgtaatcccagcactttgggaggccgaggtgagtgggtcacctgaggtcaggagtttgatactggcctggcaaacatgatgaaaccctgtctctactaaaaatacaaaaatcagccaggtgtggtggcacgcacctgtaatcacagctacttaggaggctgaggcaggagaatcgcttgaacccaggaggcagaggttgcagtgagctgagatcataccgttgcactccagtggtgacagagcaagactccgtctcagaaaaaaaaaaaaagtggtagagtacaaaaaatgaaaaattgcagaaccatatcaattatgaatatggattcaaatatgctgttagctattagcaaataaaatacaagaccacattaagaaaataactatccccacatgaaatttagcataaaacagcagtattagtgcagttattagaaaatccattaaatagtccaggtgcagtgccttatgcctgtaatatcagcactttgggaggctgaggtggaggttgcattgcccaagctcatgagttccagaccagcctgggcaacatgttgaaaccccatctctacaaaaaagacaaaaattagtcgtgtgtgatctcagctactcaggatgaagtgggaggattgcttgaacccaggaagtggaggctgcagtgaactaaaaccgaccatgcccctgcactctagcctgggtgatagagccagaccttgtctaaagaaaagaaaagaaaaaaaatccattaaataatgcaccataaaaatacatctacaagaacaagtcatgtgactttctccatagatgctgatgaagcctttggaaaaaattcaacactcatttattattattgttattattattgttgtttgagatagggtcttcctatgttgtgcaggctggatcaaactcctgggctcaagggatcctccttcctcagcctcctgagtagctggggctataggcgtgcaacaccacacccagtgcaatgtcccttattgatatcagcactccagaaaaatagaaattagtgaatactttcttaagatgattgcctgtacctatagctgagtgtgtgtgtgtgtctgtgtgtgtgtgtactggaagcattagctaatacaattcagtaagaaaaattaattttgaaacatagaattgcagctgggcacggtggctcacacctgtaatcccagcaatttgggaggccaaggtgggaggatcacctgaggtcaggagcttgagaccagcctggccaacatggtgaaatcccgtctctattaaaaatacaaaaattagccagacatggtggcatgctcctgtaatcccaactactcaggaggctgaggcaggagaatcacttgaacccggtaggtggaggttgcagtgagccgagattgcaccactgcacttcagcctgggcgacagagcgaaactccatctcaaaaaaagaaaaagaaaaagaaaaagtaaataagcatagaattgcaaaagaaggaaactatctctttttgcagatgatgtgatattatatatggaaagccctagagaataaaataataagttaacagaatgtgaaattgctatctaaaaaccaatggcattcatctaccagtcaaaagccagtaaggtgatgtaataaaacttatgtagaataacataaagatacttaggtttagacttatcaaaaaatgtgtaaaacatacatgaagaagctttaaaacaaacattcttgaaagacacaaaatagacttgaacaaatggaaaattccttgttcttctataagatgacttaacatcatatagatagcaattcttaacaggttaactcaaaaatataacaatcccaggccgggcgcagtgtcttatgcctgtaatcccagcactttgggaggctgaggcaggaggatcaggaggtcaggagatagagaccaccctggctaacacgatgaaacccagtctctactaaaaatacaaaaaattagccaggcgtggtggcaggtgcctgtagtcccagctactcgggaggctgaggcaggagaatggcgtgaacccgggaggtggagcttgcagtgaactgagattgcgccactgcactccagcctgggcaacagagcaagactccgtctcaaaaaaaaaaaaaaaataccaaatccaagatggcggccagcaggaggctgattaagagcttgaggaaatctgcaaatgtgggatgaaaaacttcccgtaacatccaggttgatgaagctaatttattgacttagcaagggcttattgttcctgacaactctccatatgattaggtgaccttcagaatcgaaatcaactttccagcagagtatccattcaaactaccaaagatcacatttaaaacaaagatctatcacccaaatatcga

SEQ ID NO: 97375 - DNA, 14552 bp, Homo sapiens
tctgtctttcaagtcattatatggggtatgtatgtgtgagagagagagaatatgggaaactgttggaggtgtttctgttggtcatcgggggactgtcccccatcagctgtcccaggcagaggcagctgctttggagggaggctactccttctcgctggaaggcttccagcaccagcaggcttgcctcttgcctgtggtcctataaagggatgctgagactgtagggactgcactgattgactttctggttcccttttagttgtgaggttctgtgattctgtgacatgattcccacagctgttttgaatgattcgaatgattcctgaggccttgatgttcttgggagattcatgcatatctgaattctatattattctgccaaaaatcttaaggttttgtggaaaatagccacatatttaaaattttagtattttagtattctcatatttaaaggcatataactatcttaaatccttagaaatgagtgtgctgcatgttagggagtgaataaagacacagcaacaaagcagtttaattcagtgaagactcttttttaaaaaggcaaaatgtggctccttctgttttgttcttatctgcctaagtggtgagccacagcgcaccttattgaattatgctcagatctggcctttgctagcggggacagcttcctgctctctctctgcttatctttctgtctgatctttccatgtaaatagcaccctcagtgccagaggctctaggttgtcctgctgtatgtttgcgttttcctggccaagggggactgggcacctgttgttagaaaggagcgacatgaatgacgtgcttatctgtgtccattgcagggttaccctggataccccgatgaacaggaaatcaatgcctgaggctgacttcagctcctggacacccttagaattcctagttgagtgagtattacagacatgtccatgactgagcagcttccagcccctattctctgcctgctgtggtccagaggacaagtctgtgttccctgagatcgtcaatccgggtggtcttgggaggtctctgggactctgaggatgcattgcacatcagacggaatctcagagtagctggacttggagacaggcagcacagtggcagaatgggtagtgccgacatgaatcctggctcgctccctcaccaccggccatgctgagcacattattgacctgctgaggcctcagtttccccacctgtatcatgaggtccatcatgcttgttaggattaaacgtgatagtgtgcggcaagcactcaacacagtgtctggccataacaagtgctcagtgatccccagctgcagtttgtgtccttactgctgtgatgaggagactccatgggggagggggacaccacgtagatggcctgggggcacatatctgaatctgtgtcaagccacagacccacagaaagtgccctttaatttccgaaatcctttttgcccatttgtgaatatgggtggcatttgaacgctcatgggacagagagctgaattcctcttttgtgtttgtttaggtatcagttcctcaagcccctctagttagtaagcatgtgttcatcgagcacccactatgggccaggtgctgccctcggctctggggtcacggtgaggacaaagatgggatccctgcccacagggagcaggggtgccgagagggtcaaggtgacagcctgacccagtagtgcctctgtgtaaactgctttgacgactgtttataagagatgtttgtgaagttagcagtgtgcttctggcctgatgtcacaatctcatttaaattaaatcgggagaaatttgggacttgcgttttatgtttgaaacgtgtacttacagaacactttttatgtcccagtcaccattctaagcacttcataactcttatttaatgctcatagcaaactctgagggaggagctgtcatttttatttaaggcttagagacttggagggatggcaggggctaagtcactcgcctaaggtcacacagcacagccgggatctgacacaagtggtgtggctgcagaacctatggtcttaactggtgtgctgacagttatttctgtctatgccaggaatcatgcttcatgcttgatttgcaggaaaaaaattgaagttgtagaggaaatcaagctttgaattgtgtttgtgtttgaatttctttttaaaggccgacactcccaccacacttgagatactgatctaagacctactctagatggaacatctgggatcttgtgtctgaactcgtgctgagccacagacccacagaggacgggctgtcacaggcccccttttgttctagagatcacatccacccatttgtggtatttgaaaactctcagaaaagctggcataaagtttgctttgagatgtctgtgagcacatccttcctctaccatccctggttagaatggcgttctcactcacctatccacgctgcagatgagggtgaagaagtaaaaccatttaaaacatgcatcgcagcaaaccaacatggcacatgcatacctgtgtagcaaacctgcacgctgtgcacatgtagcctagatcttaaagtataaaaaaacaaaacaacaaaaaaacatgtgtaaccaacacacaaaaccctacacaaccaaacggcactggtctctttcagagccttccctcaccaagccctaccctgtccccagagatgaggccatgacatgacagtactttagagagttttagcaacgctttgttttttgagcccatgtgctcatatgagcttgttcaaaccccagagtaggggcctgaatgactggacctttacacatcagcgctggcccagaaggttacagattggcactgggagtctcccaggaaggaaatgctgagcactttttagttaatgaaggtccgaagtctcagctggtgaattgtcaaaatggatgatgtactcaaatgtaaatgttttgtgttaaagaattatcatctacttcttgtttcttgtgaatttcttttgccctttttcattcctgtcttcttagagggtctttttgactgctgcaagtggggtcagttgctcctctcctcagatttgtgaaaggccctgttactgtatttaacattttattgtaatagtctgtttttttctatctctttttccattgtttggtgcagctgtgggtactctataaatgtttgattaaaaaaatgccaaataaatgaattgcatctgtttctctcataaatttatgagaaggtaatatagcaaagtattgtgcatgtgtctctctctttgaatgaactaattaaaatctttaaaaacaattttttttttttttgagacagggtctcactgggtcacccaggctggagtgcagtgtcacgatcatggcttaccctagccttgatctccggggctcaagcaatcatcccaccacagcctcctgagtagctgggactacaggcatgtgccatgcccagctattttttgtatttttttagaggtagggtttcacccagttgcccaggctggtctcaaaaactcctgggctcaagtgatccacctgcctcagcctcccaaattgctgagattacaggtgtgagccaccacgcctggccaaattagaatcttttaaaatcacaaaagaattccaacaatgtagaaaaataccaaaatgaaagttaaacttatgccaaatcctgccactcagagattagaatgagtacaccactgaactcactgggggcctgggtatgtgtccatcatgcctactggcttttattaattttttattattttttggagatggaatcttgccattgtgtccaggctggcctcaaacacctgggctcaagcgatccgcccgccttggcatctcaaagtgctgggatcataggggtgagccataatgcctgacctttagtggcttttatttatttatttatttattattttttgtgagacggagtctcattgtgatgcccaggctggagtgcaatggtgcaacctcggcttacctctgcttcccgggtgcaagtgattctacttcctcagcctcctgagtagctaggattacaggcacgtgctaccacggccaatttttgtatttttagtagagatggggtttcatcatattggccaggctggtctcgaactcctgacctcaagcgatctgcccgcctcggcctcccaaagtgctgggatcacaggtgtgagccatggcgcccagcccttagtggcttttaaacagtcgctgctgtgccaccccttccccccaccccacaagccgtcactgtgaaggtcagcatgtgcccagatttttgctttgagaatataaaaaaaacttttattttctgttccagaactttccatgactggatcacagggaaaaaccgaccgagctcaggaagcctaatccaggtggtaaccacagaaggaaggacggaactcaccccagcatatttttaggcctcatctcagtgcctatgaggggcctgccagaaaagtcactaacctgtctcagtgtggccttgtccagccttgtgttttctgtaacccctgtttgtggtacgagataatgagtcctatttttctctcacataatatgcatttgctctcctaggacagtgtaatacatttatgtgaagtaaagacatgcgagactggtggcctgcaaatagcatccgttgatctgtgttaactgcatagggagggctctgcatagcacctgctatagcggtgtcatgttggatcgcttttgtgactgttcatctgtccttgacagtggctgtcatcttgactactttgttgatttgttggtattggggacattttaaaggctgagttatttttgaatgtcatgtttatgtcatagacgtagttttcgcatccttgaattaaactgccttaactccttttgtggtataagcaaaactacatggactctgtcctggtatccttttcctgtgtggttgccctgtgtcctctggcctagggttaagtgtgcaagataactactcgtgagtattcagaatgttgttcctaataaatgcacttgttgtctgtcttctttaatcaaatcacatcttatatacagcagtcagagatgagtatactagaatcatggattgctggaggtcttttaatctgatgttctcagaagggggtggatttaaatcctgaaataaatatttcaacacaagaacacaggcctgattctgccttggacatgtcaaaatctgggggtgatgggatggccctgtgcatttagaagcagctctccacatatggccaatgtaggctgtcctggtcgagaactagtagtggtttaatccaacccgatcattttacagatgaggaaactgaggcccagagagacattaccttgttgccagtaactggcagagctaagcccagatctctagtcaccagacagttgctgtttttaaaggcctttaccacgtattttctttctttttttagtgaggtgaaattcacataattttttttttttttttttgagacagagtcttaccctgtcgcccaggctggagtgcagtggcgccatctcggttcactgcaagctccgcctcctgggttcacaccattctcctgcctcagcctcccgagtagctgggactacaggcgcccaccaccacacccggctaagtttttttgtatttttagtagagacggggtttcaccgtgttagccaggatggtcttgatctcctgaccttgtgatctgcccacctcggcctcccaaagtgctgggattacaggtgtgaaccactgcacccggccaaaattagccattttaaggctaattttaagtattaaaagttaagtaggtgagcagttcagtggcatttagcacatttacagtagtgcataatcaccacctctgtctagttcccaaacatttccatcaccccaaaagaaaaaccagagctctttaagcagttcctccccattcctgctccctaacccctgcaaccaccaatcttcattttgtttctgtgaattaattctgggtattaytatttttttgagacagtcttgctcttacccaggctgaagtacagtggcatgaacatggctcactgcagcctcgatttcctgggctcaagcaatcttcccaccttggcctctcgaggagctgagactacaggcacgtgctgccacacccagatatkttttaaagttttttgtagagacaggtcttgctatgttgcccgggctggtctcaaactcctggactcaagcagtcctcctgccttgtcttcccaaagtgctggtattacaggcgtgagccattgcacctggcctgttctgggtattttgtataaatggaatcagtatgtgaccttttgtatctggctgcttctacctagctttatgttttccatgttcttccccattgcatcatgtatcagtactttctttctttttgtggcataatattccattatatgtatccactgsaattttgtttactgatctgttgatagacatttgggctgtttccaccttttggctgttgtgagcattgccgctgtgaacattcatgtataagtgtttgtgtatctgttttcaatgattttggatatatacctaggagcaggattgttcgaccatatggtaatttytgtgtttatcttttttttttttttgagatggagtcttgctctgttgcccaggctggagtgcagtggtgygatctcagcacactgtaacctctacctcccaggttcawgtgattctcctgcctcagcctcccgagtagctaggactacaggtgtccaccaccacacctggctattttttttttttttttttgtatttttagtagagatggaagagacagagtttcaccatgttggccaggcaggtttcaaactccagacctcaagtgatccacctgcctcggcctcccaaagtgcttagaattacagctgtgagccactgcgcctggcctctatgtttaacttttgagaagtctcttgattcttgccactacgaggtgattttatccaactattacaggaaagaaaatgggagctcagaaggttggactgcttgttcaaagtcacctagctagagagctgcgcagctggaactagtatacaagtctagctgttgaaagcaccctgagcacrttacctcatgctgtaccttgcatgtcttgttgtttycaattttcagatgaagaaacagttccacacactaagagacttaacgagggtacagttagtttcaggagagctggtagttttcattccgtttagaacyggacctggtaactgttgattatcctaataaatgcacttcatttatcgtgttgcctttttattttgagacagagtctcgctctgtcacccaggctggagtgcrgtggcatgacgtcggctcactgcaacctccgcctgcctggttcaagcgattcttctgcctcagcctcccgagtagctgggwctacaggcgtgcaccactacacccagctaatttttatatttttagtagagacggggtttcaccactttggccaggatggtctcaatctcttgacctcgtgatccrcctgcctcggcctcccaaagtgctgggattcacaggcgtgagtcaccgtgcctggcctgtctctttaatcaaatcacatctcatatccagcagtcatagatgagtatgctagaatcatggactgcttggaagtcttttaatctggtgtttacctactcatccrttggtggaaatttgggctgcttattaattattaattatttttaattattgaataccagatctggtttctaaatggaatgaagactaccagctctcctcaaactaattgattattgaggtgtgtttcttttccttccctggtgatgtgcaaagagaatgaaaagggaaaaggggccaggaaggagatgttttttctccttcattcattcaacagctaatcttgagtaccaactgtgtacaaggcactaacctagatgcctgggacacataaagaacaagtagacaaagactcctacccttaatcattgagttttattctagatgggggagagggtgacagataataaacaatagaattcataatatgaattcattggagagtacragaaaggtgaactgtrgggggaagagagcaaggtaagggggtgaaggagtgttggggagattgggattgcaatttcagaaatggtagtgttatgaactgaatgtgggtgtctcccccaaatttgtatgttcaagacctcactctaatgtggctgtatttggagatggggcctctaaggaagtaactaagatgaaatgggttcgtgaggatgggcactgattcaacaggattagtgttcttatgaggacagacaccagagttctccctctcactttcttcccacacgcatgcactgaggaaagtctgtgtgaggacacagcaaggaggctgccgtccacaagctgagaagagagccctcacaagagatggaattgactggagcctcagtcttggactttcagcctccagaacagagaaaataaatgtgtgwtgttaagccacccactctgtggtgttttgttatggcagcccacactaatacaggcagtgatggaatatctcgtgaggaagtgacgtttgaacacatctgaaagaaagtgtagaaggcagccaagggcatctgaggtaaggacattttaagacagaggaaccagtcattgcaaagagcctgaggcagtagtgtaccaggtggggtgaggaacacagggaggctgggttggctggggcagagaatggagcaaacagaggggcagtttcaggagataagatcagacagatgattgtgtagggtaggggtcccccaattttctaggcccacagtgcccttagtgtctcagtaattttttacaatgcccctacatcaaagaaactaactaatgatttggatttacaagtggttgggttctaacaattttatagtagtaatatgactgatattgctctatgacctagaacatggaaagtaccctgtagagtccctgtgaatgctgccttggagtgccttggtgcacagtttgggaatagcaaatgtaagggggtgttgggcattttaaggatttggttttggattttgggaactaccgcaaggattttgagcgaaagagtggcatgatatattttaaaagattgctctggctgttgtgttgaggatagtactgaggtttttgcaagaatccaggcaagaaatgacagtggttagggtggtagcagtggaggtcgtgagaggagaattgggaaatggtggatattttgaagacagattcaagaggatttcctggtggatttaatgtgacggtaagagagaaaagagtcagtgatgtctcccaaagtttttcacgtgagcaaatggattaagttagcaagtgtgatagagaaggctgtggatagagcaagtattgggagtatctggagtgttgttttggacatagaggtttactctattaataccccagtggagatgttaagtgggcagttgtattaagtctggtgtttgagagagagagagatctaggggtcctgagagatctgggggtcctaagcagttaaagttatgagactaggtgagatcactaagggaatgtgttggccagggtccagaagacagaagccatgcagtattgtgaatgaggtcagtgtaatataaagaattatcgagtagcaaagattaattctaaaaggctaatgagaactctgaagaatattcttgtgccgagggacagcacttgaggaacaaatttggaagacaagtccctccccaaggctgggacctgagcttcattggagaaggtatggcggtggacatagagtaggacatagagaggtggacatggagaagttatggcactggacagcagagtttgttgggttccctgggcctgtgttggtctacagccactggggaagcaggaagcaccctgccagggtgcatgaagtgctgctggatgtccctcacatgtacatggtaaccatgtggcaggaaccatatggaagcacaccagaaccaggaaaggaagccccctcctccaacactctgtgttggcaaaactgaacattgtatcagctatgcaggagaaatgtttacagagtccagttccattattgcagaacagtcaatgaagggtggctttggagcagagaggaaataaattggaaactggcaatacactaaatatgtgagaagagaagagaagaagataatttctctgataatagggagaaaaaaaatcaacaaaagggcactgaaagagaacaaccaataaagtaggagaaaaagtaagaatgtggtgtcccaggaataaagtgaagaaagtatcaagaagggagggaatgagcagcagtgttgaatgctgtgagaagtcaagtaagataagggctataaaaactgaccattggacccagctgtggggaggtccttgcgatcttgacaaacagttcagtagagtaatggggagtagggaatattcgagtggggttatgaaagcatgagaggagaggaaatggtgtacagacaactttaacttaggttaggtactttgttggaatcttctaaactttatccttgaacagaatctggaaaactctaccaggtttttgaatctgtttgttctcacaggtatgctttatagctgaaatcatttcttagggaattgatcagatacatgtaatttgaagcctggcttattgaattttagcttccctcagcccgaacttgcctgaagacagcttgcctctaggtgctaatttcctgctacattccagattgtggcttctgcccccttccaaatgggctgtcaccagcttggaggtcagcctgcatgttcctggaagctgagagcgtacacagcttctaggaatagaacagcatgccatggggctcctccagagtactggggaggaacccgctgtggtctgttccattaaacaattgtgactttttctttggaactttcagtgtgagtataacctacacctagaagcaatatagagttatagaagggccctgagtcaggtcacatgaatttggacatagttcttccatttacttgctgtagaaccttgagaatatttcttacatctccatatctcagtcatatgagaaacgggaacattatcatgatctccagggattaaacaaatgaatgcatgcaaaaggactggcatatagaagtgctcagaaagtattggttgttattcttattatctgtttctaattttatatggaagtatgacgggaaagtaaagttcatgtcacacagcacgtggcaatacttcggttcttattgccaaataatattccattgtatggttatgccacattttatttgtccactcatcagttgttagacatgtgaattgtttctgctttttggccatagtcagttatgatgctgtgaacatttgcaaaactcaccttttgtgtgaacatatattttcatttcttttggtacatgcctacaagtagagttattgaatatcagttggtgactctatattcaaccattttagcaattactagactgttttccaaagcagctgcaccattttacatttccactggtagtgtatgatggttttagtttttccacatgtccagtccagtcagtcttgatttacatgtctccagtcagataagtccatcctcttcctcctatggtgaggagcaagtaaggacctcaaggtctcatttgtcagagtgccacaagtattacataatttttaattcagttggtatcttaattttggttttcttaaaaatcggcactgattgcttgattataggttgtctctttttgattatagccatcctagtgggtgtggagtggcatctcattgtgattttgatttgtatttccctcatagctgatgatgttgagcatcttttcatgtacttgttggctatttgcatatggtgaaatgtctgttcagatcctttgctcaatttttaataatatccttttattactgaattcttagattctctatatactctagatacaattcccttatcagataagtgatttgccacacctttctttcattcagtgggttgtcttttcactttattgatggtgccctttgaagaacataatttttaactttgatgatttccatttgcacataagctttcgtttctcgctgttttctagggaacctggactaagcacctgagtgaggtagatattagttccatatctggtgagggaactaaggatcatagagtttaagttattttcccaaaccacatagccggtgtagaaagaagccagaatttgcactgaagtctgtgagatcccttatggacagggtgcaggacatactaagtgtgagttgagcttgcacattggaaggctgggcatggtggctcccagccactatgggaggcctaggtgggtggatcacttgagcccaggagttagagaccagcctgagcaacatagtaacaccccctctccacaaaaaaatacaaaaattagcccagcatggtggcacatgcctgtagccccagctactcgggaggctgaggtgggagaatcacttgagcctgggaggttgaggctgcagtgagctgtgatcatgccattgtactccagccatcatggagtgagaccctgatttggtttggctgtgtccccacccagatgtcaacttgaattgtggctcccagaattaccatgtgttgtgggaatggaagggaaccagggggaagtaattgaatcatggggccggtctttcccatgctattctcgtggtagtgaataagtctcacgagatctgatgggtttatcaggggtttctgcttttgtttctttctcatttttctcttgccgtcaccacgtaagaagtgccttttgcctcccgccatgattctgaggcctccccagccatgtgaaactgtaagtccaatgaagcctctttttcttcccagtcttgggtatatcttaatcagcagcgtgaaaacggactaatacagaccctatctcaaaaacaaacaaaaagagattgcacattggcacttggtccctgaatgtgctaatgatatgtggcattcatgggccatctgctgtgtgtgtggggttttacatacatccttccttgtatatccttaaggcattcacctcttcagcctccaggatgggaaggtttttgcaggaatgtatcttttcctctcttgaggtcctcacttgctcctcaccataggaggaaggacggatttatctgattggagagactgtaaataaagactgactggaacatatggaccaggggcgggtctgctgcatggactttgggctgtgtgggttgctcactctcctgccctcttcttgcctatgcagaactgatttctcacctctaccttcctgtctgttcctggtgggttaggaacgtagaggagagaagggatgaagattagtttctcttaccccctgaagcattatttttcacagtgcctctccacctgttcagtgttgagtaagtgctgaatgagtggacagggaaacagccttggagaagcttactatcccgcacatccctactaagtgatgcaaatgagtcagggagccggggtccacacccaagcgccacccttggtggtttgtatgattctctggttagggaggcatgacggtaacatctcctcctgtttattcctgccatctgctgctttgtccgcctctcatctccttggtggcttcctccatgcagcaggttggtggacacaggtgcactttgttcactacctggccctgccacaccgtagttatgggaccacgagcaatgggccagcctttggcctcttttctcacatttattgcttgcccttctcagtcccagtctgcatgtcaggcaccacattttccaggctcccctgtccctggcttcctgtagggtcaggcagttgggggcctggtagagaaagggaggatggggagaggggagaagcacagtatccccattacccctcctgcctcagtggcatctcaggggcagtggtgacgtcttcagctgtggtgcgtctcctctgttttccccgctcccactgactggctccttcctcggtggaagcagctccccagggcctgcccacggctcttcctttgattctcagcccttgagttgcagtggcttctcactgttgctcatctctgggtcgcttcattgtcccctgtttggattctggatttttccgtctctgatatgacccatcctctttattaaatttcctctgttggagtggttctgttttctggctggtccctgaccgatgtagtgtcctatcagtaaaatgggagtgctaccatctcccttatggtgtggctgtgggtattcagtgagatggcagctggttagtatttaccgtttttttctgtacttcagagggaagagtgggcctctctgggaaacagtgcctctgacttctgcatttttaatttgccccaaagccattagttcttaatttcagtttctacttgttgcaatgatagggtggtagcaatatca

SEQ ID NO: 97376 - DNA, 24207 bp, Homo sapiens
tacaaacatttccagcaaaggcaaatggagggacaaatatagaaactagtattagtgtacaattggtctgcaacactacttaatattttcttcaggatttaaaagatatatgcataaaaataattacaggtttatgttaatgggtacatacccaatatatatagatgtaatctgtgacatcaataacaaagtgggggtagatggaattgtaaaggagaggttactgtgtctgactgaaattaagttgatatcaatttaaaatagattgctataacttcaggctgttatgtatgtaatccctatggttgtaaccacaatggaaatgtctgtagcatatacacaaaaggaactgagaagggaatcaaaaacggaaactacaaataatcaactaaatacaaaataaggtagtaatgaaggacaaaaaaagctataaaatatatataaataacaaaatatcaaaaacaagtccttccctatgagtaattactttaaatataaatggattaactccttaatcaagagacacagattgacagaatagattaaaaaacaagacctgactacagctgaccctcaaacaacatgggtttgaactgcacaggtctacttatatccagattttcttccactcctgccacctctgagacagcaagatcaacctttcctctttcacctcctccttagcttactcaacatgaagacaatgaagatgaagacctttatgataatccacttccacttaataaatagcaaatacattttctctttcttatgatttcttattataataacattttctgttcattagcttaccttatagtaatataacatacaaactatgtgttaatcaactatttatgttaccagtaaggcttcttcaacagtaggctactagtttgggaggcggaggcgagaggatatcttgagcccaggagtttgagaccagcctgggcagcatagggagacactgtctctacaaaaaataaaaaaattagctggacatggtggtgtgcgcctgtagtcccaagctccttggggaggctgaggtgggaggatcacttgagccttggagttcaaggctgcagtaagccatgattacaccactgcattctagactgaagttacacttggattttcaactgcaggtgaggggttggtatccctaacccatgttgttcaaaggtcagctgtatattctatctacaagaagctcacttttgatctaagaacacatatgggctgaaagtaaaagaatggaaaagagtcaattcaaagagtgaccaaaggagagcaggggttgctgtaccaatatcagacaaaagagactttaagtcaaaaactgtcacaagagacaaagaagtacattatatcatgataaaatagtcaattcaccaggaatataaaacaattataaacatatacacagtaaacatcaaaacccctaaatatatgaaccagacactgataaaattgaagagaaatagacaactatcaataatagtaatattattatactaggagactgaaatgtcccactttgaataatggacagaaaaattagacagaagatcaatatagaaacagaggactcaaacgacactacagagcaagagtgtaacggagcgccctgcatgcaacgccagacggtgggctacaaaacaggccttaatgcattttaaacaatccaaaccatacaaagcatcttttccagtcacaatggggtgacaccagaaatcaacagcagaaggaaaactggataattcacaattatgtggaaattcagcacagcccaatcttaaacaactgaagagtcaaagaagaagtcataatgaaaattagaaaataccttgagataagtgaaaacaaaaacacaaccttccaaaacttatgggatgcagcaaaaacagtgccaatagggaaatgtacagctgtaaacacttgctttagaaaagaagaaagggctcaaacaacctaactgtacaccttaagtaactagtaaaagaacaaactaaacataaagctagaaaaaggaggaggaaaaaaggaggaggaaaaaagtaaaaaaggaggaggaaaataataaagattacaggaggatagagaatagaaaaatagagaaaataaatgaaactaaaatttgattcttcaaaaatcaacaaaactgtcaaacctttagctagactgactaaggaataaagaaagaagactcaaatagctgtaatctggaatgaaagaggggacattactacctattttacagaataaaaatgattataagagagtactacgaacaactgtatgcctacaaactggataacctagatgaaatggacaaattcttgaacacaaaatccaccaagataaataataaagaatttggcaatgatttcttagatacgacaccaaaagcacaggcaataaaagcaaaaataaacaagtggaattacattaactaaatggcttctacccagcaaaagaaacaatcaacaaaatgaaaacacaacctacagaacaggagaaaacaggtaaatagtacatctgctctgaaaggggttaataattagaatatataaagaactcttaaaagtcaaccacaaaaatagcaatctgtttaaaaaataacagataaaaagcatacaaaaagaggctcaacatcatgaatcgttagcaaaatgcaaaattgcaatgagctatcacatcatatattaggacagccactatcaaacaaacagaaaataacaagtattagtgaggatgtggagaaactggaacccttgtgcgctgctggtgggaaagtcagatggtgcagctgccttggaaaacagcatggagcttcctccgaaaatcaaagctggaactaccatatggttcagcaatcccacttctaaaagagttgaaatcaggatcttaaagagatatctacacactcacattcactgaagcattattcacaacagacaggagagaaataatccaaacatccatcgacagatggatacacaaaattcaatttagagctgaactgaattttgaatgaaatattattcagttttaaaaaggaagtaaattctgacatgtgctacaacatggatgagccttaaaggcatttcactaagtgaaataagccagtcacaaaaagacaaatattgtaggattccacttacatgagttacagagctgtcaaatcacacagacagagagtagaagggcaggtgctgagggcagtgggtgaggaggacttattgggtaaagagtttcagtcagggaacatgaaaaagttctggagacggatggtgatggtggttgtgaatgtacttaatgccacagaactgtacatttaaaaaggattatgttgctaatttttgtgttatgtgtattttatggcaacttctaaaatccttcaatggctaggccaggcaggtaacagaaataagttctgtgggtatcggacttaaggcactctgtggggtgagggatggggataaagagggcagggcccacccactgtgtcaaatacaaaacgttttacaattctgatcacactcacgccctactctctcaacgaaggagacagatcatgcctgactaaggttcttcctgctgaaatgtgctggcggagctcctcccttgtgctgctggctgctctgccatttccacagcacatgacatgtgcagttcttctaggcccctctggctctggttagatgacgcctactccaggagtagggaccagcccccatcccagaacctccagcacccaacacaaaaccagatcccagcagctgctcagccagcacctgttgaagggggtctgctgatggctcagcagtgtactgagggggaaaacgggcagtaggaggaagatgcaggcatcatagatgccacaggactgggtgatggccatgaactgaaacaggtcatctgggaaggggccatttggcaggaggcagcagtgatcaggtttttgacatgctgagtttgatatgccagcgggacatcagtgggaaacaggacaggccctatgagaggtgacaggtttggggctggtccagaaataggacggaccctatgagaggtgacaggcttggggctgggaatgatgcacattaaggcaacgtcagctgagactgggagaagagacgtggcactaggaatgtccgttccaaagtagcacctcccataccacaacagccctcccttccttagcagactataacccaaagtttcaggtttctaagtaatcatcaaatgtttaattaaattacaatatttctagagaaagttctgaaacactccagggatgaataatgaggacaaaaagcaatagtaacaccctacaactgtgaatacgtttaataaaatcctctttatgtaatcaagacttttttttttttgagacagagtctcactctctcacctatcacctaggctggagtgaagtagcacaatctcagcttactgcaacctctgcctcccaggttaagcaattctcctgcctcagcctcccaagtacctgagattacaggcatgcaccaccacgcccagctaatttttgtatttttagtacagacggtatttcaccatgttggccaggctggtctcgaactcctgacctcaaatgatctgcccacctcggcctcccaaagtgctgaaattacaggtgtgagacaccgcacctggcccataatcaaatcttatcatgtcctatgttagtctaagaaccatattctacatgatcagattcacaggtggtatattaaatctagaggcaaagttgctccttatttactgtctacccatttaaaaaaaccctttatgtgccatgccctgtgtccagcaccccacaaagcctgcctcacagccctgggtttccctaagacagcaccaaggccctgggaatgtgtgtaaacggaactgtctgagattgcagtcagtgtgtggtggagcacacaagagtccctggcttcagtccccaaattgaacgtgctttatcacgactttagagatccaaaaaacactcacatacatagacataccttacatagacataattactgaagttacacaccaagttcaggaagacaaaagcaagagtccaactagaacacagtactgagagagcacagaaccaggaacagccttgctcttgcacaagggtgggaagaagagttcttataatcatgttcaccaacccctctccccaaggaacaggtcatctccatgtacctgtgtcccagatctaaacaccaatttcattccactaggttaaggtgtttgcccatggctgagacacctgccggagaggaaatggggtttctgtgggaaccactaacaccacagcgtgaatgtgttgatcaggttctccctgacagactctttgaggaaaacaatgtcatctcagtctgttctttaaaggagagacagggtgggatgaggctgtaaggaaggtagcgggtggggactgagggaaggcaggggtaggaagtagggtgcacacaggcaaacagagaggtgtggctcctgccgaggccaccctccagcaggtggaggcaggagtcagagaagagaatctgagggtagagcagtgttgtcggtggtaggagctaccctgtcccctggttggctttctagatggggatggcaggtcacctcttggaaatacaggggccatctgatgtggattgatggctgcctaatctgttggccggtttcttcaggttttcagttcaagtacacggaagggtcatgaatgcaaatgcctgccatgcacgctgtatcaaaaaatgaagcacattagaaacttccactcatcctcctggtgggtttcagtaggtttttctctccttggcaaaaaccggtgcgtgaaccgcccgtcaacaccacctgctgtttcctttacacaggaggcggtgggaggggaggcgcttccagatctcctgacacaaagggctgcccacctccctggtcctttacccgaaccttcaggaggcagacgacacacacactagccagccactctctccaaggcaaggggagggggacaaaaagcaattttgagatttgtacagtgcttgccaggtccttcaaaaatgactaccggccgcccatggctcttgcacagcgggtgggaggaagagtccttgtaatccacctctcccaaggaactcctgcgcgaggtttcagattccccgcctgcaggctatggctgacttccccgtatcctgtgtgacgtgggatgtgtggcttcgcgcaggtaaggctggaatacaggtgcctggagggacacccagagctgcccaggcacttcccggcggctgcttcctttgcactttgcacttacaggtgcacttataataaaaacaccctcccttccacgctcccctgggccctcccatctctccttcctcttccacgctctcctggctgttgaatgttttccactgaaggagtctagtctgtccacctagggggctctccctccctcggtccagggcattcgcggctcacaggtcagctcgggcagaaccgccctgaccacctatgagctcctcgggacaccaccccaatgccagggtgaatcgtccttacaccctcagtcctgtccgagcggcctgatcctacctgtttcccagaaactgctacgcgaagcttccccgccgggctcatccagggcggaggggtctgtccctgacgcagactgggggcgggtccgcaaaagcgggctgaatgaatgaacgcagcagggctggggccccctggggctacaggcccctgctatttggcccgccctgtggcccaaaacactggacttgccccccaccggtcagcggagcccagacatccagggagccctaatggagcctggacaggaaggcagcaggaggtgggrcccggggtgcgagtgaccccgaggccgtcctccggagcgcagcgcgcccgcgtgggggaggcccgcctacagtcggtgatccccggccgcccccgccagcgccccggcccgccgcttaccatgcaccgcgcgctccgccacacccacggagacgagtgcccttttccggggagcaggcggcagccggtcttttgggctcccccgccccggccggcgccaccccggcctccacccgcgggatacgaccccacgattccctagggcctgggctccgccccatgcacgtggcgtcacaggctgggcgggggggcgcacccagccgcgcaggcgcaggcgggagaggaggtgggggtcgggggacccagttgcgcaggcgcgggcggagtatgggtgctcagctgcgtaggcgcgatggccttcttttctttctgcaggtggccttgcggttttctccagtccacagccgggctggcgtcggcccagagaggggggctcggcagtctggttccccgagcgtctcakggcgggccctcgccagattcaaggggttcccttggccagtttccttacggcgcggcggagctggccctcgtcgtccctggtagggggcagcctcacagcctggaccggcctgtgcaatttcccccatccctccacgtctacattttatttttttctttttctttttttaggacaatgcatgatggaaatgcagccacatcatagcaggcaggttcatgaaatctgccctcctcccaccgtttcttgaccccattttcttatttttttttttaacaggttctcacccaggctggagtgcagtgatgtggtctcagctcactgcaacctctgcctcccgggttcaagcgattctgttgcctcagcttcctgagtagctgggattacaggtgtgcgccaccacgcctggctaatttttgtacctttagtagtgacgaggtttcgccctgttggtcaggctggtctcgaactcctgacctaaggtgatccgcctgcctcggcctcccaaagtgctgggtctataggcataagccaccacacccggcccttgaccccattttctgtcttcctagaaatcaccaaggttgcaactcctgactgtcctggctcacaggctccagcttacttaaggaccccacggtgggggctgcccacttgcacacctatgctaggcgccctcattcccgcaagggccagagccccttcccggcccatggcgtctggccaaggaggtgtgggtgcgccccagccaggcctggtcctagaggacggccccacctgcgcactggggcatctgggagagctattagtggaagaagcccaggttcctgaagcaccaagtgggcaagagtttattttcaggatgggacgcttttgagggtgaataagtgctagctgtatgggatgcggggacagtacacaggcccggcctggcagccgggcaatgcggtgcctgttggaaggtcgcccacaagcacctggttggacactgccactgagatttggttattacagaggttagcctatgcgggccttcactgatggaccttgaagtgtttcccagttgctttgggttaggaataatgtgactggatcccgtggattgtctttgtgcatgcatgtgggtatatctgtcagaaatattcttagaggtggaattggctatggtgggatatgtcctttaaaataatatattagccaaacgtggctaaattgccccccttagacactgtactaatttacactctggcaaataatgtgtaagactgtgggtttccacacatcttcaccagtggggtctttccaaacttttggatctttcccaatccaataatgacaaaactatatctcatggttttaatttacacttcctagtattttgagatcctgtcgtgaagtggtgatggccctgtttctgcctgctgcacttggcaacatgtgttatcacttcctttcttttcaccactttttactcttagagtttctagaatttgtgaaagtaaaatctttttgctggcatgggcttttgtgtgtattatacactgcttggaaaggtcttgcaccacatcttcccttcgtagattgtttctcaatgtttaatactcagctcaaatgtcacctcctcagaccattttatctagaatggcctcctctagttattctctgtcaccttttatgttatttccttcatagcactcatcacactgtaaccacccaacagcttcttcttgcctgtcgcccagatagagccaatttttcaagatgggaattgcaataaagagttcgatacacatagagctggctaamcaggagagcagaggcttattactcctcaaatcagcctctcctcaaattcggagtctaaggaattttttggggggggtttgtttttgagacagtgtcttgctttgttgtccaggctggagtgcagtggtgcagtctaggcttactgcaacctccacctcctgttcaagygattctcatgcctcagccttacaagtagctgggattacaagcgcacaccaccatgcccagctaattatttgtatttttagtagagayggggtttcaccgtgttggccaggctggtctcgaactcctgctctcaagtgatttgccctccttggcctcccaaagtgctgggattgtgccagtctggaggctagggtttttaaaagatagtttagcagtcagggggctagggaatggtgagtgctgattggttgggttagggatgaaatcctgaagagatgaagctttcgtcttgctctgggttagttcctgggttggggtcacaagacgagatagccagtttaccagtctgggtggctagtccatcacaatgtggggtctgaaaaataccttgaacaccaatcttatgttatataatagtaatattatctattggagcaattatggaggttaggaatcttgtggcttcgggctgcatgactcctaagccataattttttttttttttttttttttgagatgaagtcttgctcttgtcccccaggctggagtgcaatggtgtgatctcggctcgctgcaacctctgcctcccgggttcaagcaattatcctgcctcagcstcctgagtagctgggattacaggcacctgccaccacgcccggctaatttttatatttttagtagagacagggtttcaccatgttggccaggctggtctygaactactgacctcaggtgatctgcccaccctggcctcccaaagtgctgggattacaggtgtgagccatcgcgcccggcccataaattttaatcttgtggctaatttgttagtttcacaaaggtggtctggtccccaagcaagaaggaggtttgtttcagggaggggctgttatatttggtttaaagtgaaattataaactaagtttctccacagatttgtttggcctatgcccaggaatgtgcaaaggcagattggaggttagaagatggagtcggttaggccagctttctttcactgttgtaattttcctatgtcatatttttcttattgtcataatttttgcaaagacacaacacccgtcattacttgtttgctgacttgtttattggtaaattctttgttccactactgaaatgaagctccatgagaacaaataagttggtctgtcctgctcactgctgcatgtctggcactctgtctagaacatggtaggtgcctgtagcatacattattggtgctaatgtcccttgcctgcctctgccgtcagctctctgattgttgtggagagttcccctgaatgctgccacctcaagcatctcgttgctgtcctctttagggcttatcttacgactttctccggaagccttgggagcaggcgcagcctggaattcagggaaatttaacatccccggggcaactgcagggcagtttgggtggccttggacagacccagtcccctttttaccatgtagttctcaggaataactgcagaatgtgctaggattgcagcatcttgagataagggagaactggctgaacagcccaaggtcagttccagtctcctgctgaaaataggatgtccttcaacactgcccagcaaatcacattaccctgggatgttaaacccagggcaggctgctctctggcattcctcgtctgtggtgcaagtggggcatgcccagttgagactccatttgccctgagcagatttcctgagcctcaggcaaccagcttgcaatgaatgctcctcttgtcccttgctgcctgtctgtaagtaataaatttgcttcatataacttattgagtatgaatgcgttctctctcactggacacagacatgttggtaaccaatgcacagtgaacctccttcacagcaacccttaattaactggggatatatacctcagccttctgtccccagaggaccaattctgagtcctcagtagaagtgagcctcagtgacccttagtggtgatcagctcagtaatgcccccttgggttggtcctccgatctttctcggttctctctctctctctctctcctgcttctgggaatcacctcccaggtcaactacctgcatctaagctcttgactcaaactgcctttgggtaaactcaaatgaagtcaacatataaaatatttcttgaagaaatggatggattgatgagggtgcttctaatgttttcacttgtcagccagaagcagctcagccctgcaggcagaaggtgaaggaagccaattggcacccgccctaggaatgcaggagcagataactgagacatgggctccagcagaacatgtatgcaagtgttctgacagcaggggggagtgcctggccctgctttttgggggtgagaatgttttagaagaggttggtgagttaccaagctgcctcaatttacctaacttgagtaatagtggaggaagccctctattgtgtgtggcttgctcacatgtgtccacctactcacaaaagtccaggaggacagctgcaaagctgtctgctcagtgaaggaacagaacatggactgtgcagtgtctctgtagcagaggctgccaggcctcctgcctgtgtctgtcccactgtgtgctcccgtgactctccacagcagggccttcttttggcagaggaagtgccaggaggtaatgcttctgagagcagtttcagcccatgtcaggtgcaaagaccctggctccctttccactcaggacaactctccggcatgtctacttggcattgaacacagtggtccagagcggtaacccacactggctttcctcccttccctgtctcactgccccactcctctactggtttttcctggtgtcacctcctaaataaactacttgcactcaaatcattctttagaatttgttttggaagaattcaacctaagataccatcactcataggtcatttgttaataatatcaaacaaaacatcttagccactgctctgatttcttcctttggttccctgaaatctataaccacaaatcactgctttctctaccaaatatttttcctgtaactcaccaaaaaagtcagatcttccctgctcatggctagccttccattttccaaaatctactacaaacaagaaaaaatgtgagggaaaccctactcttccccaagagaacttggcatttatgattcctgcctgccacatgggccattgtgtggtctcttttagcttcccgatggatgatccaacagaygtcatcttgcactgtagtgatagtcttgttgggaccacatgaagtgcagctgtaaaacaggtaatactgttcttggcaattggtcgactgtcctggtagggggagactggtgtgaacagattgtcccatttagagtagctgttaatggactgtcttctctccatgagggcctttagcattttacattgtataggttgtcgtctaccagattaagaaaatgttcttctatttctagtttaagagttttaaaaaatcattaatgaatgttcaattttattttgtgcatttccttcatctatacatgatattattatttttctccactaattttcttttttgtttgagatggagtttcgctctgtcacccaggctggagtgcagtggcatgatcttggctcactgcaacctccacctccctggttcaagcaattcccctgcctcagcctcccaagtagctgggattacaggcacacgctggcatgcccagctaattcttttgtatttttagtagagacggggtttcaccatgttggccagactggtctcgaactcctgacctcaggcaatccacctgcctcaaccttccaaagtgctgggattacaggcgtgagccaccgcgcccggcccactaatttgttaatatgataagttctaacgttgaatcattcccgcattcccaaataagcatacttttaaaatacattgctggatttgacttgctaacattgtgtttaggttctttgctcctacattcacaaaaagattggcttctaatgttctttctaatatagtacttgtttagaaactatcaagattaaattagccttacagaatgagttggagattttctgcctttaaatcttctaaatgggtttaagttttgaagtttctatttcttgaatatttgatggaatatttctgttttctgtgtgaaatattttaaactgctgattctatttctaatcaagctttctacttctttcgcaggcagttttggcatctttctaaaggaatcatcacatttcacctaagttttcagtgttactggtataacattattcacatcttcttagcatttgcagcgatagcctccatttcactcataataattaatttgtaaattttcctttttttcttggtcagcatctccagaaatgcctaagttttattacttctcttccccaagagctaacttttggctttgtggaactcctctgtatctttgtttaatatttttaaatttatttcatctttattatttctttctttgtacttagagtgtgttgttttttaaaattttctagtttaagctgaacacatattaatttttagcctatcttctttttttaaattaaagactaaaactttattattcttatttaaaataaatgaagcaaaagaagttacaagagaacttatgtctaaccaagaggcaggtgggtgagtgggaagggaggctgttctctkctcactgcaatgctgcacatcatggtggagagtaggtcatgctgtgagaaacaaactcactggtccaaacccaaagtttgggctcagagacccagagaacagtggaagcgagactttaatgacaatcttgcaagatcgggtgtctgatgggcaggcacacccagtacagtttcaaaagcaatttatcccctagtgtgcaggtccctcccttggttcctcataggctgagtactatggggtcacagtcttcctggacattgcctattggttgttgggtaggggttttaggcattttctttaggattgttctgctgcattttgttgcagccataatacattgcaatcctagttagctcaagggctcttcaagtacttgacttatgacctaagtatctgggcaggctgataagaacagacaaagtgagctattttgcaagctagtaaactttcatcttagactaaactcctttggtttgggtgagggcaactaaggcagtggggtagggkggagggtggggaggcgacaagcaggcattggctatccaagcaggggcctagtgtatcctgtttcttctgtagtttgctgacctaaaccaattcaaggcactttgtcttggaaatggaccactgtatatattatttccttcatgctcagtacagatagctctctcagggttattgttaacattcaaggggtgataaaacaaatgcttcctgcagccaattccattatctaagaatccaagtcaaattttgttttgttttgttgagaaagggcattgcaaaggttcaaaaaaatgaagtccaaatagcactgtatcatcaagcatttgcctttttaaagaatgtatgtatattttacagcccagcacctcacgctcaggaagggtgtttctgaagactgataaagccccttcagtgaatggcgccagggcacagctgtccacgacaaagtgagggttagtaactgcagcgaggaagccacatcagaggcctcctgccttcagcatgggatagacaggattgcggagaagggaggagttcaggtgaagtttaaaatgaagccgtttctgacaggctgaaagcagggctgtgggtcacagggtgacacatcacactgggctgagaggctgacttgggggcccgagctcaagacaaatgcaccatgttgtatctggaagccccttatctgaggctgtgagccaaggtgagagctccaggctgcttctctgtgtggagyggcctgcatggctgagcatctgcaggcgacaggattccagacagcaagstttctcagggcggagaagtggagtacgagatttctcagcacagaggctgagggagctgcctcaggctggctatctttgttccttagccctgctctcctattacctggggcctgcccctcctcccacctatctcctggctcccagtctcccaggctccagaatgcttgggccaaggtagctaggtaaccagaagacactcacccttggtgcactggaaacagtaacaccagagtgtcctccacatgaccccagaactatgacaaggtccccctcaaaaaccatccctactagggagccccaagccaggctgcccagtgggagctatgtgctgctgtcttactcgaagtcaactttcagcctatcttataagaaatgcagttagagctttgcatttcctataagcacccttgtagctctgtcccacacatttggctrtattgtatttttgtaattgtcagtttggaacattttctaaagtccactattacagtgtttctctgtccatgtgttatttagaaatatttttgctctctccattccaagatggccagataagaatagctccagtctgcagctcccagcatgatccacgcagaagatgggtgatttctgcatttccaactgaggtacctggttcttctcattgggactggttggacagtgggtgcagcccacagagggcgagccaaagcagggtggggcattgcctcacctgggaacaacaaggggttgggggatttccctttcctagccaaaggaagccgtgrcagactgtacctggaaaaacgggacactctcccccaaatactgtgcttttccaaaggtcttagcaaatggcacaccaggagattatatcccgcacatggctcrgtggatcccacgcctatggagtcttgctcactgctagtgcagcagtctgagatcaacctgtgaggcagcagcctagcaggggaaggggcgtctgccattgctgcagcttgagtaggtaaacaaagcggctggggaagcttgaactgggcagagcccactgcagctcagcaaggcctgctgcctttgtagtctctactgctgggggcaggkcatagcagaacaaaaggcagcagaaacttctgcagacttaaacatccctgtctgacagctctgaagagagcagtggttctcccagcatggtgtttgagctctgagaatgaacagactgactcctcaagtgggtctctcacccccgtgtagcctgactgggagacatctcccagtaggggccaactgacatctcatacaggtgggtgcccctctgggatgaagcttccagaggaaggatcaggcagcaatatttactgttctgcaatatttgctgttttgcagcctccgctggtgatacccaggcaaacagggtctggcrtggaccttcagcaaactccaaccgacctgcagctgagggacctgttagaaggaaaactaacaaacagaaaggaatagcatcaacatcaacagaaaggacatccacaccaaaaccccatctgtaggtcactaacatcaaagaccaaagagagataaaaccacaaagrtggggagaaaccagagcagaaaagctgaaaattctaaaaaccagagcacctcttctccttcaaaggatcgcagctcctcaccagcaatggaacaaagctggatggagaatgattttgatgagctgaaggcttcagaaggttggtaataacaaacttctctgagctaaaggaggaggatgtttgaaaccattacaaggaagctaaacaccttgaaaaaagattagacgaagggctaactagaataagcagtgtagagaagaccttaaatgacgtgatggagctgaaaaccatggcatgagaactatgtgttgcatgcacaagtttcaatagccaattcgatcaagtggaacaaagggtatcagtgattgatgatcaaattaatgaaataaagggtgaagagaagtttagagaaaaaagagtaaaaagaaatgaacaaagcctccaagaaatacaagactacgtgaaaagaccaaatctacatttgattggtatacctgaaagtgatggggagaatggaaccaagttggaaaacactcttcaggatattatccaggagaacttccccaacctagcaaggcaggtcaacattcaaattcaggaaatacagagaacaccacaaagatactccttgagaagagcagcctcaagacacataatcatcagattcaccaaggttgaaatgaaggaaaaaatgttaaggccagccagagagaaaggtcgggttacccacaaagggaagcccatcagattaacaggagatctctcagcagaaactctacaagccagaagagagtgggggccgatatttaacattcttaaagaaaagaattttcaacccagaatcacatatccagccaaactaagtttcataagtgaaggagaaataaaatcctttacagacaagcaaatgctgagagattttgtcaccaccaggcctaccttacaagagctcctgaaagaagcactaaacatggaaaggaacaaccagtaccagccactgcaaaatcatgccaaattgtaaagaccatcgatgctaggaagaaactatatcaactaacgggcaaaataaccagttaacatcataatgacaggatcaaattcacatataataatattaaccttaaaagtaaatgggctaaatgcgcgaattaaaagacacagactggcaaattggataaagagtcaagacccattagtgtgctgtattcaggagacccatctcatgtgcagagacacacataggctcaaaataaagggatggagggagatctaccaagcaaattgaaagcaaaaaaaaaagcaggggttgtaatcctagtctctgatgaaacagactttaaaccaacaaaagatcaaaagagacaaggaaggccattacgtaatggtaaagagatcaatgcaacaagaagagctaactatcctaaatatatatgcaacaatacaggagcacccagattcatacagcaagtccttagagacctacaaagagacttggactcccacacaataataatgggagactttaacacccactgtcaatattagacagattaacaagacagaaggttaacaaggatatccaggacttgaactcagctctgcaccaagcagacctaatagacatctacagaactctccaccccaaatcaacagaatatacattcttctcaacaccacatagcacttattccaaaattgaccacacagttggaagtaaagcactcctcagcaaatgtaaaagaaaagaaatcagaacaaactatcagaccacagtgcaatcaaattagaactcaggattaagaaacttactcaaaaccgcacaactacatggaaactgaacaacctgctcctgagtgactactgggtaaataaagaaatgaaggcagaaataaagatgttctttgaaaccaatgagaacaaagacacaacataccagaatctccaggacacatttaaagcaatgtgtagagggaaatttatagcactaaatgcccacaagagaaagcaggaaagaactaaaatcaacaccttaacatcacaattaaaagaactagagaagcaagagcaaacaaattcaaaagctagcagaaagcaagaaataactaagatcagagcagaactgaaggagatagagacacaaaaaacccttcaaaaaatcaatgaatccaggagcgggttttttgaaaagatcaacaaaactgatagatcactagcaagattaacaaagaagaaaagagagaagaatcaaatagacgcaataaaaagtgataaaggggatattactactgatcccacagaaatacaaactatcatcagagaatactataaacacctctatgcaaataaactagaaaatctagaagaaatggataaattcctggatacatacaccatcccaagactaaaccaggaagaagttgaatctctgagtagaccaataacaggctgtgaaattgaggcactaattaatagcctaccaaccaaaaaaagtccaggaacagatggattcaaggctgaattctaacagagggacaaagaggagctgctacccttccttttgaaactattccaatcaatagaaaaagagggaatcctccgtaactcattttatgaggccagcatcatcctgataccaaagcctggcagagacacaacaaaaaacagagaattttagaccaatatccctgatgaatgtagatgtgaaaatcatcaataaaatactggcaaaccaaatccagcagcacatcaaaaagcttatcctccatgataaagtcagcttcatacctggaatgcaaggctggttcaacatatgcaaatcaataaacataatccatcacataaatagaaccaatgacaaaaaccacgtgattatctcaataggtgcagaaaaggccttcaacaaaattcaacagtgcttcatgccaaaaactctcagtaaactaggtattgatggagcgtatctcaaaataataagagctatttttgacaaacccacagccaatatcatactgagtgggcaaaaactggaagcattccctttgaaaactggcacaagacagggatgccctctctcaccactcctattcaacatagtgttggaagttctggccagggcaatcaggcaagagaaagaaataaagggtattcagtgaggaaaagaggaagtcaaattgtccctgtttgcagatgacatgatggtatatttagaaaaccccattgtctcagcccaaaatctccttaagctcataagcaacttcagcaaagtctcaggatacaaaatcaatgtgcaaaaatcacaagcattcctatacaccaataaacagacaaacagagagccaaatcatgagtgaagtcccattgacagttactacaaagagaataaaaaacctaggaatccaacttataagggatatgaaggacctcttcaaggagaactacaaaccactgctcaaagaaataaaagaggacaaatggaagaactttccatgctcatggatagaaataatcaatataatgaaaatggctatactgcccaaggtaatttatagattcaatgccatccccatcaagctaccaatgactttcttcacagaattggaaaaaactaaagttcatatggaaccaaaaaagagcctgcatagccaagagaatcctaagcaaaaagaacaaagctggaggcatcacactacctgacttcaaactatactacagggctacagtaaccaaaacagcatggtactggtaccaaaacagagatatagatcaatggaacagaacagaggcctcagaaataacaccacacatctacagccatatgatctttgacaaacctgacaaaaacaagaaatggggaaaagattctctatttaataaatggtgctgggaaaactggctagccatatgtagaaagctgaaactgggtcccttccttacaccttatacaaaaaattaattcaagatggattaaagacttaaatgttagacctaaaaccataaaaaccctagaagaaaacctaggcaataccattcaggacataggcatgggcaaggacttcatgactaaaacaccaaaagcaatgacaacaaaagccaaaattgacaaatgggatctaattaaactaaagagcttctgcacagcaaaagaaactattatcagagtgaacaggcaacctacaaaatgggagaaaatttttgtaatctacccatctgacatatggctaatatccagaatctacaaataacttaaacaaatttacaagaataaaaacaaacttatcaaaaagtgggcaaaggatatgaacagacacttctcaaaagaagacatttatgcaaccaacagacacatgaaaaaatgctcatcatcactggtcatcagagaaatgcaaatcaaaaccacaatgagataacatctcacacctgttagaatggcgatcattaaaaagtcaggaaacaacagatgctggagaggatgtggagaactaggaacacttacactgttggtaggagtgtaagctagttcaaccattgtggaagacagtgtggcaattcctcaaggatctagaactagaaataccatttgactcagcgatcccattactgggtatatacccaaaggattataaatcatgctactataaagacacatgcacacttatgtttattgaggcactattcacaatagcaaagacttggatctaacccaaatgtccatcaatgatagactggattaagaaaatgtggcacatgtacaccatggaatactacgcagccataaaaaatgatgagttcatgtcctttgcaggcacatggatgaagctggaaaccatcattctgagcaaactattgcaagcacagaaaaccaaacaccgcatgttctcactcataggtgggaagtgaacaatgagaacacttggatacagggtggggaacatcacacactgggacctgttgtggggaagggggcagggagagggatagcattaggagaaatacctaatataaatgacaagttaatgggtgcagcaaaccaacatgacacatgtatacctatgtaacaaacctgcacgttgtgcacatgtaccctagaacttaacgtattaaaaaaacttgctatatcatagttttatgtatttttgaggtacatgtgatattttgatacatatgtacaatgtgtaatgatcagatcagggtaactaggatatacatcacctcaaacatttaaggacagtttttgaagagagagtatgtcacagtacgagttaggaagcacctgtgccatggtcgtgtcccctttctcataagtaattattcacagcttctttccttctattctgtttactctagtaactggggtacttcttagtgtgagtacaaagggaggtggaggtcaggaccaacatgtacatacaggtatgtcctcagtgtctgcgtctcaggtagcacttttccaaaatgacattcaaataattgtgaggttaaaattctataattttttttttgtttcttggattttaaatcctacatttggcctactatgaagttcatgaccataaatggaacttgtatgtcctagagattagcaagttagtggtttctttaagtcaaaaaaataaccagtatttttttagattgctaataaactttaaaaaaagattaaaaaagaaacatttttaaatttttgaattaatttctaaatttaccttttaatcagtgaattctcacttgattgagctgtgggccagggagtgtcatctctgatatccactctgtggaggttgttgacatgagctttgtatccctctttgtaactttttgcaagttttccatggtactggagaagaatgtgtgtgctgcacctgctgggtgaataaaatgtcccttatatgctgcttgtgaagtgtcatattaattaggataaggctgaagtgcccaaataaagaggcccaatgcaggtctgaagcccatgcatgcgattgctccccacggcactgactcacggcagcagggctgggtgggtgccgctccacgtggccggccagcctaagacccaggccgtgggctcggccaccttcaccatgcggtgtcccgggcagtcctctgagcatctctgctccaggagggtgggagcgtgtcttcctcactgtttttcctccaaacagtgcccccctcacaggaagcattcagtaagtatttgttaagaacactaatcaatgaatgaagaaaagatggccccttagtcatcatagcgtcaacatttaataaatgtttttttaagttaaaaatttttttcaattagcaggacattgtatgcctcaaaatttaaaagatacaaaataacgtcatcaccatcgtcatcaccatgattttggtagatttctcagcctgccagttccctttcctggaggcatctgctgttaacagcttatttgtgttctccagatatacttcataaatgcacaagcatacgtgcatatgtgcagactggtttccaaaatgttttcctatcacaataaaatgtttcaacttcaaccttgtttatacaatttctgaatccacgtggagaatgtatttggtgtcatttgttgagaggacattaggcggcagtatagtatcacaaggaggaggctggggctgtctacacattttttttttggcctggcaccatggctcacgcctgtaatcccagaagtttgggaggtcaaggaggaggttcacatgagcctaggatttcaagaccggctgggcaacatagcaagacctctagctactggagaggctgaggctggagaagctgcaatgagctgtgattgcaccactgcactccaaaggaagagagaggtgttgtgtggctattacatatcttgccatatatttccaagtttttctattacaaatgatgactcaatgccttgagtcataagtcataatgctttgagcctgaggcaggagggtgctggagtgtttatacactgggtcctgtcagttattgttgagtgctattccctctgcatatctgacctgctgcacactcaagttcttgaaagagccttcgggcccagagatgagatacaggcagttggagctgactggagttggtgctggaaagctagggtctgagggccactgggggagggtcactgacaccctaactcatggaatcttagagttttggagcagaaagggagctcagagcatactagtctactccctcccttctctcatggagctgggatgtgtttccctgagcactgcattcccatcgtgaagaggaggctcagacaggaaaac

SEQ ID NO: 97377 - DNA, 33585 bp, Homo sapiens
  misc_feature (1)...(33585): n = A,T,C or G
ggggggaataatagtgcataatcactctaccatagatgctatttaataagcacactttcacacttcaaggtattacacttgaaaagtaactaatataatctgtaatattttttcctgtattaaaacaaaaagtaacctcaactgagagggattgtgtcactaggcctacttttttttttttttaactatgataaagtactaaaaattaaggcccctcacttccaagaaagccacagccagttagcttaaactctagatatattagtggtgtgtaaatatttcacttgagcatataataaggtctgctagacaagttctttttctgtggcatgttggaaataaaagtggcatcaggaaactaatttccattgagcacccccttgactcatgcacaattagactctctgcatagattacacttttacaagaaatccatgatgaccattttatcatttacgtttttcaaatgatgaaacatgttcagctagcttaaataatggattacccagtacacgttcatctgtgtgtacttaaacccaaccttgaaccagtttaagcaagagaggagttttttgaaaaactatctaaacaaaagaaacgatgagggcagaactgcactgcacttagttcaagggacctaaactttgattctcgttttttttttttttttcttttaatttcttactcactttttgtgagtaggaaacctcacatgcttgagtttgggacacagtcttttttctttaattcaccgtaagaggaaatgggaagattatcctccagttccaaataagacacttataaaacagaaaaaaccggaaatctaattagcctcgcttctatcataggtctatctctggagcaatcactagagtcagaggggcaaaggggttcatgattggctcattcctgatcatgtgttcccagaaggaaggagatggggaccagtgcaatggttagcacatgaaaaccatagctttcaagaactttctcattgctagaattgtcagttggattctgattcatccatttcaagcctgccgtttctaatacaccttgctattgtaaaacatatttcaagtctacccttcctaatacaccttgttattgtaaaacatatttgctataaatgtggtggttttaggttacaattgaattaaactgaaggaatattacagacattctcttctgactgtcaaacttgacctagaagagatacttcttattttggagcaataaatagtggatgtaataggcaagaagtcacaaaatgaatcaacatcataacaaatgtatgagcctttctatctgtctacccatcagatctccaccttaatatccaagcagcaatctgaatatagaacattagtcagaaactagatttatctaattgctgttggcccaagagctttaatttgaaaaggattttttcaaaccgtattctctaatcacaaaacatagcatgtaagcataaggatacatgttaatatatcctgcttggtttcaatacactcagattagctgatgataatcttttataagctatgcatgttattttaatcaggataatatttcttcactgagatttatgagaacttcatttttttaaaaagatctcacttttctatttatttcccattaaccctaattccttttgcctaagatcttggcaaattcccagagaatgccaaaagtatatcaccttcctaaacatgcatctggttgacatgtaggtggagacagatgttggcactgaggaggaaaaatggggttgaaatattctgcctgagtagggaatgaagaaagctcttttgcctgactggctcccttattctatttgaagattacaatgtgattagttaatttaaatttaactgttaaaatgcaaatagattgttgtcttcatctttctttaattcttacatgttgacattaaataactaatcacataataaccaatatttgacgtttaatcataacgcacaccgcaacaaccacaaaaaatcctcacatcctgcattgtcatcactaacttgcatggaaagtgtttctatactgagccttctggcaatattcagattattaaaaattaagaatttctttccttataaaagaatgtacctgagtaatgaaataatctgtacaacaaagccccatgacacaagtttacctatgtaacaaacctgcacaagtacccctgaactttaaatataagctaaaataaataaataaataaaaataaaaaagagaatccagagttttactcgaacccaataagagttttgaaagcatgaactttacctaagatgtactattcatctgttggcaactgtttctgacttggcgattttctctctaaatagattaaacatttaaaaaaaaaagaaaatatgctaataaactattatgggaaaaataaatggttctattttgagtctttgagaataattaaggataaaaatatcaattagttcaatgccatgggcaacttcagctcttaaagtcaaaagtaagttacgtaatgactcatgtactggcacatgtacattaatttgagttctgctgctacttgcatcttttgaaaaacaaagcagcaataagtcaaacagcattggaaatcctttcaaaatatttatctataaagcacagctttaaggatcaacatagcttatcataaacagagttttggatgtcagtatggtagctactgaagaatggttaaaaccgtttgcattctgggcttacttctgtaaatctaaggtgccacttttcagaaaagctgatttcaagagcttcttacataaatagctgaagttccaaaatgtgtctgctgcagggtgctgtagtttaagtcctcctccactgacttgcaggcctagagggacaaaacacagggtgtttagtctgcttatgatgcaaaacagaagccaatttctatacatgatgggaaaatgagggaaaagaaaaacaaaatgcccggatatttcttattcattaaaagcagcttttgtgtcagttagtcttctacatggaagaattacaatgagcatagaagactgaagtaaacttacgtagctaacatttgctgcaagaggcactttacctgaatcattgctaaccctcacaaaagcccttcaaggtgggcctgaggtgggcactggtgttgatatggacaagtacaactgtcagcttagatggtaggtggcccatgtgggatgacaactttagttacctggcttcaaaatccatactcttcctactatactacctataggataaaaaggtcagattctatttcaagttaaagaaaactgaactgagcagttacctaagcaaatgtggctcttctcctacttgattgttactgaaagaaatcgctgttagatctaagcagctgtcttcagagtctggtcctgcaatgcagttaaaaagaacctgtactcccacctcttgccaattgtggtaggatagttagcacctcctggatctgtccatagtagatggaagataagagaatgtcatatttagtgtagagctaacaccacctaagattttgacaaacatcagagagagaagcccatctccatacctatctccagaaacttgtgcacacaaatggtgaccctaataaaaggcacaggagggaggatgtaattttcagtattttattttaacttggaatctataaatttatactacacatttcctttaaacatatgtatccttaggaatgtctaagtatgtagttttcagaaataagccttagaaagacatcacaataaatttgtacaaataatctactgcaacttttttagttttttataatgacatctccagctgccttgtcatgctaacattccattattctatgcccccaaaccatccttccattagagaaaaaaatgctcatctgggtcatatcaaatataattagcctaatagttgtatgattatggaattgtctcaagttccaaatgcatccattcccttaaaaattaatagttttgcaatggagataaatgacataaccctattagtaggaggacattaaaaagtgtagtggaggttaaactgtatcaatataaagaagaacaagaaaaatgttaaagttctctctctgcctccaacccttttcccaccaactcccaagtcccttgcatggaatacaatgcaccaatagaaaggaaagatggaaattcacttgatactcaacacatatgtattgggtgcctagaacgtgccaggtattattctagatacttgcagtatatcacaatgaaattaagattcctgttttgcagtaccttttattcaaggggtgagggtgcttggtaggggtgaggggtagagagagagaagcaataaacaactaagcattaaaagtgataactaagtaaattagactacagtattacaaagagtagatgggggatctcatagagaatttagttgtgatcaaggctaatgagttcccatgtagacatctaggaacaagtattccaggtagaggccctaaaccaaagacatgcctggcttgttcaggcatggacacagtgcttgggatgaagtgaataaggggaaacattgtatgggaggaggtcagagagttaacaggggccagatcagcatgcagtgttgttggcttttataaggacatagccttttactttatgcaaaacaggaagccactggatagttttgagcagaagagagacatatctgagttacattttatatcattattctggttctcttttaaacaatttttttatataaatttaaggctctctctgagaacagactatggaggaggcaagggtggaagcaacttggaaaccagtcaggagactccggctatcatttagttggtggtacagaccagaatgggagtagttgaggtgttaagaagtggtcagattcagcaaacactgtgaaggtggaattaaggagattttctaatggagagagagatttcaaggataccaagattttaggcctgagcagctggcaaaatggagttgccatcaactgagatggaaatctctgggttgaacagatttgtaggagaaggcaaaaagttaagttttggacaaaccaagtttcaggtgtctattagttatccaagtgtagatgtcaagtaggcagtttttgaactggatagagatatttgggagtcatcagcatcggagacattgaaatatgtgcttctggatgagatcaccaaagagtcaatgcaaattgagaaggccaaggactgcacctcgaggcactccaatattaagacatgggagaaagaagggaaagcttagcaaaggaaactggaaatcaatggccaatgaggtggaaggaaaaccaaaaaatgaagaaagaatatccaaaggaggagttggtgagctgctgaggcaaatgattctaaatccactaatggaaactagagttttaaaaagctaactatgtgggaaaaaatggattctccacccctttggtccatataaataaaggaagaaatttgaagtgcttttatatatgcaacttaacttcatgtcgttgtttaaaagccaaaacgtttcacaggtacatagggaaagcaagctgcaggctcagggctgagaacacaggtcccattagtcttaaggaagggtgttttaaattctgacctcaattgtttagacaatgttgatttcacagcctccaccttatatatattatcatgtaggagatagagtgcttgctgcagtaagttcaggtgttttgtgttgcagagaaaactgtaaaatctgttttagatgtttgcatgtttacctagtttttcacttcaaaaaattggtgaagagacttctgtcaaaagaatttcagtgggctacctaccacctctttcccacagtggaagcagagattggtgattaatatcctctgtcctgcgggggaaaaaattcatgatgtcagaaaatgagtgagtcaacagaaagcctacctaagagtctccttggctgaggaggaagacgaaagcacagttctgagcatgagagctcacattctgtttctaccaggtgctgaagaaaagcaagacagggtaagttatggatctatcaaarcctgaagtgggtggggttgctttattaggttatacttgagtacctggttactgctggaaatgtatgctgtgcgtggacaagagtaaccgaaaagagagtaacagagytgggtatctggagtcacacttggtttacagaaagccaagaagggacaaaatctagaaatgtcctttacacttgctgacagttataagttgcggaaaactagcgaggtgttcatgtttgcaaatcaatggacttctgaacaggaantttcagatgagtctcttcagaataaaattatgaaaacagattattagcatcgtctttctctcttcccttccctcccctccccttccctttcctttcctttccttcttctttattcttgcttccctcttcctccccttccttcctttctccaccttagaaaattaaatgctctttttgattatcttagtggttaagactgaagagttgatcctgcgctgtgctgtggagtgggcagcttctctccatcttctctcaccctgacacactgtcttaggattccagtctcagaagccaggtattgggtatggtctatattctgaaaaataatttttatcattgatgtgagacttttaaatttttctatttttagtcatttttataaaacagaaagaaaaaaaatccacctcaaatcatttcagaatcaaaaataaataaaaataaatgctttaaaatcatgcatattttagtgtttctattttatatattttgataacaaaattgtactgggaacacaacattttcttggtgcwaggagatattcayaggcacttaatcatttatttaaataatccacaaacatggaggttaagcataaaatagtgacgttgtttatctatttgaaatgttaaccatttattttccaaaaaggcaatatataccaaaggaaaactaaattggcatattttaactctacaaaaatgtatrmatatttaaatttacagcaaaagaacaattatatcatctaataatgcttacagtatttaaaatctgtcattatgcacaatctacttttataaatgttaaagaaccatgtgccaagcatatatctaaaacatttttgaaattactcctttctagctgtggctacactgaycaaaacaacaacaacaacaacaacaaaacaaaacaaaacaaaaaaagctgaaatacaaaaaaaaaaaacaaaaaaagacatgtaatcatcaagttcttttttccccctygtgctatttttagcagaaatttcagyacaactggaaccaagcagcagcttactttcgttttcacaccaatggaatgcatgatgaaaatctcatttttaaaaaacattatagatatagccttaatcatctaattttccattctcattctaactcattaaaaacagaatattgagtgatttgttctccctagctaaaaacaaaaacaaaataactttatataacrtaacacaagtatcgcagaagtggtctttatcttaaaggatccttaagaaaagagctgcctgaattcaccagtatttcagagggatttttcttttaaaacaaatacagtgaaaattgtctttagaatttattgaccaatataaaacaaactgggctacacatatacacaaattatttaaaacacattgctggtgctcattcaacaccataaattcatacaatagctgatatttagtagcagttcgaacatggtgtagtcacaacagatgtgtccatgtactatacataagaggggctgatttcacctattccatattttgacatattggggaaaatgggcagtggcggaatcctgaaacacaagctgcctttagagctaattgagtttttgctgcccaactgaactggaaatttattcaagatttgcagcagatatcagccatgcaggatgacagctgtagatggtgacacatccattaaaaatttgaatttctaaaattcttcatatttgtgaaatcagtacactttataacttaagaatgcatacatgttttgcctcctctgagactagatttagcatctgtaaatgagatgcaagtaaaatggttgtgagcagatacgatcatcatttcttaagtggtgaaaccatgtgcggtgggagacagtattttgaggtttaccgaactaattcagaatatgatcctaacctcccaccaaattttttaaaaaggtaaaaacagttctgttttagtgtagttatttttctctctctgtacacttttttcctttttattagactgtttctaagcaccatggcaaaatcaaatttatggattgtgtttaccagagtttacagagctccactgggaagcctagaaatctctgctgatttccctgcagtctttgaagctccataacatagaacctaatcttcacagtaataggtggtctaattctctgtgcaagctgtaggccaaaccttacttttaacctgaagataattagaaggaaaatgaaagtgagtatgttccattagttactactgaaaaggctttgcttccctgaaacccagtttgccaaatgatgcttgsatgttcctgtaatcatgctgtttctagtttatttctgctgtaggtcttagtgcttgtattattttaaagaactaattttatttaaatgactagtaagaatttaaatatttctaaagaatcaatatactaatcataatttttttttttgagacagtcttgaggctgaagtgcagtggtgtgatcctggctcactgcagcctcygcctcccaggttcaagcaattctctcacatcagcctcccaagtagttggaattacaggtgcgtgccaccacatccagctaatttttgtatttktagtagagacagggtttcgtcatgttggccaggctggtctcgcagttctgaactcaagtgattcgcccacctcagcctcccaaagkgctgggattacaggcgtgagccaccatgcctggccccataacatgtttaatgaagatatttttccattattgttccatttctataattttttgagtgacagtattagtttatattaacaataaggggtccaggcaacaccactttagatatatgatccttagaaaagttatattacatatctgggtttcagtcttattatctataaacagagaaactaagacaaggtcatctgtaaagtcctttaaaaatctctgtgtttattccattgactgcacttagaagataaatttagtaatagttcttaagaaatcatgaaaatacataatttttaagacagtgatatctctcctctgaaagtcaaaatcttataccttcaagtggccattggacacaaccaaaaaataaaaaccatttttagcttaatgaagcaacttatgtaatatagcagcattttaataaaatttcatatttcatttccataaggcaggatattttatccagaaaattagagtccatagtttaatgtgaagaatattaggaagaaaattaaaatttgaagacaaagtttttggaaatcctgtctaaatatattagcctttattttaaaatttaaaatacaaaaaaagtatgatacagttacacttagcaactttaacacacatttttcagttcattaattcaagaaatatttagagaatatatatgccagaaataccaaatgaacaaaactgacaaagcccctgccttcatgggacttaccttctagggcatgtgatgggcatgtttggggctggggagggggaagtatagacagaaataaagaagcaaactcatagattgtcaggtacaggggatagggaaggcagatgggagaagggtttgtcttactgataagataatatttgaactgagatcactaaggggagctctctggggcagagggaacaaaacactaaagcaggaactttcttgggagccataatagggtaagtaagaggcagaataatgagagataagagatggtgttagaaaaaggtagaattgcatgtgtgtgtgtgtgcatgtgtatgtatgtgtggtgagtggtgtggacgtgtagaggggtaacactcataaaggaccttgaaggccaccggagggagaagtcattggaagattgtgagcagggaagtgacacaatcaaattcatggttaacagaatcactatggctgttgtactgagaaaagattgttcaagacaaggactgggaaattagggaactaaataataagcatattgcgattaaaaaggttagaggtagtgacacctagtggatatggtggcaagtcattcttttctagttatatttcaaaggtagcatcaaggggatttgctgttggattagacgagagttgaaacagaaatagaggagtcaaaagcaactttcagtttttgacctgagcatctggaaggttgaagttgcattaactgagatggagaagaccacagaagagattggtttgaaatatgtcagtctagctccataaataagggataagacaagtgcattatgaatccaatcatggttttaactttttgtactgaagacaataaacatttttgtaaacaaattaaatgttagtcattgctttctagtgttggatgttttgtaatattttatgccactttttgttagatactataatggcacgtgttcaagccatctgaagattgtttaaaaattcttttctaacatgaaactcatgtagttttagttttctcaccatgaccacaatgaactttcacatatttaaaattctgctaaaacgtttcaagttcagctttgatggggtagctgtatttataaaaatttgccattgaccattttctacataacatgcattttgactaacaaagcaataagtggaacatatggtatacatgagtccttgagagttgaagctttttcaacttaagtaataatgctgtgcagggtctttttaccttagtaaggagaagaggaaatgaggggagaaaaggagtgtaaaratgaaaaatgggaattttacatgaggcctcaatggacttgagaggctgctattaatttaaggcaatggttcactgcctcttgggagtcatagccttctttccaagtttgctgtgagtgacatactcccacctcagaaaaaaaaatgccctgatattcaacattttgcttacaattttaggaaattcacggattcacagagagctcatggtgaggggtgtctatatktaaagagcaaacctgaaatgctccaggttgtagattcttccctacagttgtaccaataaaaagtcaaaagaggaaggaataccagtggcaaaaatcatttaagattttactgaccatcagaaagtgtcctcattttcattataaagcagtgtatgtgcatgtcagagacatagtttgtatgcagtcaaaatgattaatcctttctataagagctttttaagtaaagatgaggaccaaagaagtggaatcttctgctccagaaaacacttcttccacttttcctctcaaatttctcttagctgctgagtgcatttataatggataacatgcatatatagggcaactctttgagcatttaaaatgatgtcaaatataaaaacttactagcaaaaatctgattttttttcactttcatggcctctgctaatgtattttgaacataaagggttttaagatgagaaaagaaaatgtgaatgtagcctgattataactatattccttgggccataatatatggcaaacaatatatagcagtttaattacaacaaaagtttaatgaatgtgtattgagtttattcccctggtgataaaatttttagatactggagcayagcactgaaaggtattctttaacatagaaaatgaaaatgacagtggtaacctaactaaaatctttaagtgcaatagagttaaaaattaagtctaaaattctccctttcacctgcaattctgtacagcatcaatggcatgccactgtctatagagtgaagagaaaagggatggtagagtttgtggagaccaagattttggttaagaattgagtwtccaacataaactctrggagcaagattgtttagtttcagcctgtgttaggaatgattgcaacccactttgagttctctcacagtgatcgaagtgctgcggattagactcatcttgttcccctcaatgcttcgcggatttctttttttatgtactctaaattgaatttaaaaagtttccttctcttttttgaattcacattggtttaaatgtgatgcttctgtaaaggctcyatgaattcaatatccaatgtaatgtttttccttgtccaaaacttggaacattttgtaagatgaattcaccattcagaagtaatttaatatgtggccctgttgtagacacagaaatcaaacatgtttccatgaaggatccataaaaagagtgagtttataaagcaactgataatatttcataatgaagattttataaggcatttacattatctctttcaatcaccatgacaaccaaaaataaaataacctccaattaaccctatgacatgagtgcaataaasatttttcttaaagcaaacacaatttgttttacaagttgttctgttgtttaatagtagtttgctattatttatattcttatgtgctttgatcagatacaaattttagtagggaaataagcaaacatttctagaaacgaattagaaacaattgtgttttagaatactaaaaggatttttaaaactttcaattcagcaaagttaatattttcccccaattgaaataatggaaaaacaaaagcgtagacactttcatggcttggaggacatgatcttcatgtgcccaaggtcatgttccttagcagccactgttgggatctgcttccactacagtcctgcattgtaggcaccattttgtcttcttcagaaggttcatcgagacattggttactgttaacatgtcgcaacgtgagtctctgtaaaagataaccaataatcagtgcagcttatttcrtctttagctttgctagcacatcagataaaatctgttctttaaaaaatcctttatgatttttatagtayaatacactgtgatagctttgtaaaaggaactgtgcacaggtgtccctggattaattattatacawctttgactgttatgaagtcatcattgtctaatatacctttatttgcagatggctaaagaaactgactgacatttatcaagcattgccaagaattcaggctcctttgcaaaaagcccatttgtgagctccgagttcagttgaggactgcaaatattaacaagcttttgcaaaagcttagttttcttaggcatgtgttattcagtaaccatttggtaaacatgcaaatagatggcacagctgtgacccaaatgaacaaaactgctagagatgttcccatttcaaaatactaaacaagctatagtatctgtgactgtaagacactcattgtagaaagtgattatcagagcaaaaaataatctgtcttacttgataaaatccttacaatagtttggtctgtatttttaagaatcttaaaaatataacataaaaacaggggcatgatgatcacatatttttaaacattatatttatattttagtttcttcataaattccaataattgtatgttaaccagtcattatatatcttctctttggcatttttaygtacattggaaatcacatttttggacttttcagatatacattttaaatcaacatgatttatacatactaattatatatatttctgctatttcatgggcaatacytaggatcatattatatgaaaacctctccaaccagaagcgaagtatttgaatgtatgagagatgatttgcaaatatatcttgaaaatagcactctagatacttttttttttgcaaattaccaaaattaaaggcaaagaaatttttttttttttttttttttttggctcatgatactacattgaaaatgggatgaaagtaaatgtaaggggtgggccataaaaatsgtagaggaacagcagccagacgattgtagtttgcttagattaggactgaaaacatcgtggactgcactgttgtaagaaatgatggaatggagaataggtttgtggcggaagaggcctaagaggcagcaagcaggaaattaaaagagcaaggcaattagatacaaaggagatttcaagattgagacctttgttgttgctctttcaaaacatggaatcaagctatttacactaaaaaacaaagaaaggaataaatggccaaagataggcaagaagatggctgatttatgcttattatgccagaaattcaaccagtagccagcttgaaaaaataaagatgcataacaaaaacaatatgtattttttctagacagttctagttaaaaatcaacaaaattgtttcatttttgttacgtacctgtggtcttttrtgtatatattctctttcaaaaatatcacttaccattgcatacttctattagatccctttttaaaaaaagtatgatttttcatatatcaaatatgtcattgcccattaagctaccccggaaagcactcccagtgtcttattgcaattgatcacatatcatagtagttgaatgctttgatcaattatcagttaccttagttcaaaatatagcacagacttagggagatttttctttaaggaacatgttgaatagatgttgtcaactgcacaaataataattttaaaaacactagttattattgttctttctaaacaatatatgatttatttgaaggaattcactaatagtcaaaacccactgctgcagagacaaacaactaaatacttctcctttataatgtagtgcagtggaaaaccagaccttttagactcaggtaaattcctgtcctttacttactggctgtgaacactcaggcatgtttcaaattattctgaggaatcatgttctttgtcagaaaatacttagacttaaacatgcttacaaatacagtttttcccttttgtttaaaaaatttgaccttcagtcaactatctaactgtaatcccctggcaaccttgaaagggtaaaaatgttaactatgtttctaggctacattgtttatggtaaaagtgaactctgattgataaactgcatctgcaactgataaattgcatatatatactaacagaaaagcaaacttcgggcttttctaaatgcagacttgtaattctaaatgttttatttggttcctggaagctaggcctatggagttgttacaaggaaacatcatcttctgtgaggataaggctaataagccaggatggttttgacatctgcctgatgtggatctcatctccttgcaacagactgttacctgtaaagaaggctgtaagaactgctaagggaactgctccaatttctcctatggagagaagcactctgtggtctctgctctagcactctacagtagacttgtgagaataaatatttagttaagcctaagcttccttttttggcactgcacgtatcaggattggttgctctgaaagcaaactaagataatacacataaattgctctgtacataagttctctttgtgcaaaagacctagacttttccagctttaccaactcttacatttggaatgtctttggcttgaatatagttctaagtaaaatagtaccccatatgttgtcccctcatccataatttcatttctagccttgttccaagacttctragctcaattgtttcctccactaacaatctttaagtggttcatctgaaccagaaaaatgccccaatcttccttgtgttctcattgtaaggtctgggacaaagtaaaatcctttaattattggataatacactctttaaaactaaaagctaggacatgttcttatttgcactctttacaagaattccatatcagtttgttgayttgacctgtgtaatgattcattttattgcttgctgaaaagatagtcacaaatcrtaaaagtgagagataaaagatacaacttaaaaaaatattgtttcacttaggcaaccacaaagaaatgcttagaaataattttctttataaaggtattaaaaatcacatcttagtctttaataatgtgtttgcttagtgttttaattaaaataataagatactttagaaaggatatgccatatttgcatttaaccaaagtatctgaataaaaagaaacaaaaataaatgattccagtgtcttagaaacaatactttctttrgccctgttagttttttaatcgatttttttcagatctgatgacgcagaacctgttgtcatatagacatggctatagtttgcctcaaagagagttaatatttcataatatcgttcatcaagtatatttatgcatatatatgtttaaaataaagaaaaaaaacaaaaaaamccctactcattaaggatagactaaacacaacttaatatatgcagtccccaaattaatgagtagctaggaagtaaaagacagagagttaactccatggagaaaaggtcatacaaatttttcttaaccacattttaaaggagtttccagatttcaataactgaacataacaaaaatgctaaaataaatttaataaaatctgcaacacaaacctccaaaaatcattagagaatgtaatcagtagaattcccaaaaatatttctaaaaatttccattcttgtatagtttcttagtagccatttttgcaaagtgctatcattacaggtttccacagtaggatgctgggagccatcagctactttgttcactgagagacaagactgggtgattatatgaagaagagtgtgggtctgtttgacaaagaaaataacgaataatgacaaaatcaagtacaaagacagtaataaatcaatcatcctaggcaacatgcaatttctactggataaagatggaaggcacatgtcacaataattgtatccatggagctgtgagccacatttttttagatggctttaatatcaaccctataaggaaggagtaaatgaagataagactgagaatatggagaggggcttacratwaaataatgaaatatttttggcaaaaggttattttagatataaaagattatattctcagccttcatcctagtaatacaatgctttttagtaccagatgagttatttgcgagtggatattcaaaatagttgattagtccagctatggcccttggcctcctcattctttcaccctaaaattaaataaatatcagggacaaattcrgaggataatttagctttaaggctttactttgaacagtatggtactcaaattgctcccacttatgtttttacaaggctaacctgggttgtgttccacatgtacattgccacctttgttagatgtcaattagaaaggtagataatgaagggaggaaaaagaaaaagattaactcttaatctaattctccaaacaattttaattaattaatttatctgtctgtttcttgctctccatctatttcctccataggaacataagctccaggaaagccacagactatggccacctacatcttgaagctccgtgcctgcccttgggagacactaagtaagtctgttgattcaaacacttagtgaaagaccagtgcagacaataaatcctgttaaaattaagctacttctctcaggcagcttaatgaacacaaattattggatttatgttttcaaggatttatcttccacagtaaaatagtacataatttgtaaagaaagaaaaaataacattgtattcataatattaactatgtagttaatattaaaactgtaactataaataatattgttaactatatagcttgattttttaagaagactagtttatatttttgtttttaaaccaaacatgaattttccacccatactgttcaaaactgctaggctagatcatcctctactctcrgtgatatttctccttgaagtgaacttttcttggaaaatgccactttaacaacaaagatattagtgtaaatgatgttaattatgtttgtaatatagaagaaaaattatttttatgacataaaacaaaaacaaaatgattttgcttatcctctggaaacatgaccccagggcataaatacaatatagaattttcattaaaaaaatgactgtaacatatgtcccaaaggtgtttatcaaatgaatggccatgaaaaaatagtcamagaagtttcattccaggtacttctaaaaagccatagcccagaagaaaaattacaaatcttgtccttattgagacaaaaattatttttcatttaaaaacacacaaaattatttagtgtcttcatttgcttgaaaacaaagcatagttcatttttttctcagtatactgtttgaaaagataacaattattaatattgtatgtatgttctaataattttatgtatttatacaattgaggtcatataataaaatattcttttattcatgttgtgggcattttttctatcactaaaataatctacaaacatactattaagaaataaactatttctctaaaatgaatttccaaaatccatttaacttttttatttgcagggaatatctttccaatttggagctattgcaaataacaaaaatatattgtatttcagagatatttgatcaatatattgatattcagagatatttgtcattattaataacacatggcaaatatctctgaacatcaatgtctacatctgtcattatttctttggaaatgattcttagaagtgaaattgcaaggtcaaatacatgaacactttaacacatatcagcaaagtcctttaaaatatatctataacagtaattttgtaataatagcagcagcagctaacacttcttgtgcttgctatctgccaggatactttatgggtgtcagtctcactgcatcttcaccaatattacatgttgctgctaaaaacatttcttgctgtattgaaaggataagcaagaaatgaatacagtaacacacataaaatgatttttatttatgttttttaaaaactttttttcattttctttggctacatttctactatgctgtttattcaagtccttgcacatttctatatgtggtatactatttccctttcaaaaagtatagtaattaagggttgatatgctctttattaggtatatcaacccttagttwtatctgtttttgttgcaaatgcctaattagtctacttttgttttgttttagagaaagggtctcactatattgcccaggctggccttgaactcytgggctctagcaatcctcccatctcagcttgccaagtagctggtactacaggcccatgccactacatccagctatattaactcaactttgaagacaatgtgacatccaggctgacaygcaacttactgccaaatatattttcctatagctttatttaaaatattgactaaaaataggatcatctaaaccctaagatagtattgagttttgtttataatatagtattactttattgttctcctctagaatgyaaagccttggtattgcctgcaatgtagaatattttaatcgtaacatgtaaaaatacataagaaaaatattaacgattcatgcctttaaatatatttgcaagtttgactaacataaaatgtagcgtggagtatctctaactttacccttccaaatatataattcctacttaaagccaactggaatcaggctaaacaattttggtgacaaaataagagccattaatattgtaaaattaggccataccttggtattaaaacatactaatttaaaaaaatagatattttaatgaactgactgcatagttgatttaagagccaatcgcacaggtctcagtttaaaagttggtatagtaaaagattaaaataaaacccaatcaattatgttattacatataatcatatacaaaataagtataaatttgtactatatttaatttaatagcaaagataataggagttcttctgttaatcaagcatagaataacaattaaaaattaatataacaaagttgttactcaaaacattaattatgatctccagacaaggtaatctacgcattcagtcgaacagaaatattataaaatatgaagtgtaatcatttaacatataggaactacaaatatgacgctaatctattgaaattcctactcactacttctaataagaaatcacagctatgggtcaataggaatatggaaaggtaataactgtgtaatgcacacaaccttcaaaaggtaaattgagccattgtttttcttaggaatgctacacaggggaatggctgggatgcacttaaagatcacttaccttgaaattataatcccatttacctgctctctaataaaggtaaataaaagatggtagtgtaagtaaagtctaaatattaatctaacacatttcacctatggaaaaaaattccttatattgtgactctggaaattatttgatacagatgtatatagaattcacaacaagtattttctaagtcaacttgctcagtcacatgaaaaataagttatttttagtatcatatttttctccctttttttctttgttgcatagtgtttgttgaacataagtgttctgatctaaaattagattctcacactgtatgtagctgcctagttattcaaaaagaaatgtaattatgtgcacatatcatagggaaatattctaaattgattggaacataattataatgttcaaacagaatataagaacacctgaaaacaatagaattaatggatgacagaactttataaaaataatttttaaaatgtctcagtgagatgaatttttttctyttcatttaatcctggcaataggcatttcatggcacagaagggtttgtgcaatttatttaagcttccagaccacgtaggtaccccacaattttgctaatgatgcccaggatgccctcaattcaaacaggttaggccacatataagatgacagtgaattgaattcgtggttatttaaggactatttagttaggggtgtgagaaactacayttgaaatcaaagttgaccaaagaagtgcatttattactaacatgtgcttagtttcattcaattacaaggataagcaattagatattatattatgaatatgtatagctgaagtttgtaagcaattagagcaaaatgacaaagtagttttatgactgcttatttagctaaatggaccatatttattgtagaacacctttccccctattaaaaaaatgagaaattttagttcaaaatttggcataacaaataactgatagcatttagctattccatttgaaatactgtatatttagcttattatatcttaaccactgaaagagaatctaattatttccagtttttcgacaacatcaagaggcaatgtagtgtagtagaaaaattgctggatttactgccagaatctggctgtgcaaacttaaacgaggcatttaccctatgcttcattttactaatgtgaaaaatagaataactgtcttataagactattgtaagaattgcatgagaaaacagataaatacgtgttgaactgtattccttctcttttcccccactcacctaagaagtaaacaaaaccaaagtagctggatagattccatcttttgaggcttcatgacactgtttccatttttctctggatattccaacaatcttgcttctatttatgactttcttttctaagattgaaaggactatgggagataaggtgatggaatatttgtgctgttcacatggtgagattcacaattgtactgatagctagcttgcttggaatactttattaggacctgaatcctagctctgctgctagcggtgtaatctttrtgctttagttcctcctgataaaggcttaaaggagagaactttaaggtacatttcagttctgtaattctatgaactccaacaatttttattctgccttgaacctgcaccacctcagagatttttcaaagaataattttgtccttgccagcaaaagataaagaattgagttaaagtagtaagcagtgcgcatttactttccacaggttggaatatgagaagaatagaaccactgagcaattattcctctttctcatctcaacacctcttatccttttgctccctttccctctctctgctcccctctggaggccttgccattttccaaattgtattcatgccttttcctaaatttgtaacattctttaaccagtgtataaaaagactatggaagatacatagatatttgaccctgtccttttcaaatgtaaatatgtatatgaatgatcggagattttgttaaaatacaaacttggattcagtgtgtttagcatgggttcggatcctgcatttctaacaagttcccaggtgatgctactactcctggaatcaccctgtgggtagcaaggggtggaaccattctgtgaactaaagaaaccctaaatgtraaactgaaaagcatagtaataaatgttatatttcaattttgtttaaaaaamatcctttttaacgaccttctcaaaaatataatcgcacatcaaagctgaaatttccagaaaggcaatgtattattcctacaattgctctattctcatgtcatttattagattatgacctatgcattttttaatttggcaaagtgctgtcattagacaatgtaaacatcactagttaattttgaaaacataaacatataagagaatttaattaagctatataattcagatgatcaaattatttaaaataaaaatttctcaatatttatgacattttataagctttttgtgcgtgtgttccaaagtcaaagtaaacatgacacaaaatattatagtgctctgaaatactgcaacagataactactagtcatccaaaagagtaaatttatagaaatcatttatttatctacctatgtgaagctacctattttttttttcactttttacttaaaattccttagtattcaatagcattgctactagctgacagaaaatgtaaaccaaaatatacaccaaattgctaacagtagttatttgagaaatgaaagaatttgagttatgacattgttcactcaagagttatggaaaagtttaaagattaaaagtggtattctaaaattccacactgcttgcttttataaaaatgtacacgatcattcccctttcttaataaatatattctagattttcttatttttagcataagctcagtagagccccaggttcctggtagaaacggaacagtaacaacaagaagaacaagttttatttaaaaacaaatatcacttacaggatttctactatatctgtacattttactgcacttttcctcatagaagagagtactgatgaaggatttacctacatgtattttgcaaaggcactgttttctgtaggcttaatatcaaggatggtaccaataaataatagttgaagagaaaaaaattggtggtcagacaaggtgagtaagatatagcgaaggcagtagcatcttaatcacactggtacaacataggaagaattctcagtgtttgcyctcaattatggcccagaagatgattttgtgtcctaagatcctggtaacactgtatgagtgttaggcccaaaattaaccctgcacaaccagtttcaaatcctatgagaattcagtaaatttttctagtattcaacttaagaaactacagactcatgcaaatattaaaacgacattcaaaaaggtttttaaaaggtcttgctaaaatatcaacaataccaaaaactctgtagattggtttttaaaatgttattcttgtagaaaattttaggcttgcatggaatactgcatctgtgagactcatttacctctatagtagtatttatcttttaagcagaacgaagtttagttttccttttaaataaatcacctaccacttaataatgtgggaaatgtaacacagacaaccaattcattttgttaatcaaaaaagaaaactgaaagaaatgaagctgttttcaagagtaagcttcsttatgcaaaggaaaatatttcttttttattagctccatctgatggctgatctggtttttacacactgcctggagataaatttccaacagtaattttgtggttttctctccctcttctctgtcagaaaggtgtgctatattgagaagaggctactcaactttttatgtgactaattagtttactgaattctgcaaaatatttacaactgtaaacagtaaagaaatcttgttaatcttgtcagatattgttccttccagttgaggaacataaatgtcagtgattagtattgtaaaatttaaaatttgaaaatatggacatattgtcaatattatcctgtatgcacatcttcayacaaacctctcagataggcttagcttacctcttgcctaatttatgtttggcatgtacatggagataacaagttgtcatacacaaaactgattttattgtcctcattcatattttatattaatggaccaatttggtgaaacctgtttatatgatatgccatcctaatnttaccggatatgagcctgcatgcttgaaaatctaaytctgccaatgtagataaaaamcagcttaagatttaaatgttgaatgttgaaatatataactgagcttaagcatcaaataataagtaaattaagaaaatactatacctcagcatcatattcccataactgatttcctctcatatggtggcattttaacatgattacaggtccattgagtctagaaacatccaagcacaagtcatcggttcggatttctttgtcagcagtgtaagaaaatacctgaaaatataaattcagctaataaaaaaaatgtatgttttaaaatgtcacaatagagcagatctatccagggaagctttcgtatcagataaacttgtgttttcaaacgattgctggtatgttatcttgagaaagctaattcatctctttgagtctttttcctcaactgcaaaatagggacaaagtcatctgttttatgatgttttggtgaggcctcagtttaacaaaacaaayctttaaatacccattatttgctggcactgtagttctttcatgatacttgcattataaagctcwcaataggttaartaaaataaagtttacaaactgcatggagctcagtgaaggcagtccctgttcctactattgtatgaccagttctccaattctacaatgtcattttttcatatagaagtttaaatctttcttctgataacataagtacrtcgtgtaagttttattaaatactgtcagtgagcttctgaaggttgtagaagtatcttctctagagatcttattaaaggtaggctctacacttatctctctaatatggtttgcctaagcttaactacatcaattcttctgaaaatatccaagaaatgtcacggtggattatggactctttgttagataattcaattgaactataataatctttattattttgttcctggtgtgaataatttatttacaacattgattattaaggtttcatgagggttttttttttttttttttagatggagtcttgctctgtcgtcaggctggagtgcactggcgtaatctgggcttactgcaacctccgcctcccggattcaagcgattctcctgcctcagcctcccgagtggctgggactacaggcatgcgccaccatgccggcctaatgttttgtattttagtagagacggggtttcactatgttggccaggatggtctcaatctcccgacctcatgatccacctgcctcggcctcccaaagtgctgggattacaggtgtgagccgccatgcccagcctcatgagggttattaagcacataattatrgaatgtgttttcttcttttaactacgataagcattgttcagtattctgtgggtttttctttctccttgcaatgtcaacagaatacataatgagaaaggtcatgtcagggtctttttgtttctcaaagatatctgatgaaatctgaggaagtcagctttacaaataacataaactctggagctccgtaarctgaacgagttagtcttggaagagttgcctctgcagcattgctactcagaacttctatgaaaaccacaagaagtggtgagaggaagcggcaaaatcaatgacagaacacaaataccctcttctgccaaccgcttaaaaggaaattatggggggctgggtcggtggttcggtggctcaygcctgtaatcccaacactttgggaggctaaggcgagaggaytgcttgagcccaggagtttgagaccagccagggaaacatacagagatgtcagctctacaaacgataataaaaagaaaattatccaagcatggtggtacacgcctgttgtccccactacttgggaggctgagtgggagaggctgaggttggcagattgcttgagccatgatcacaccactgcactcagtctgggtgacagagcaagacccagtctcaaaacaacaacaacaacaacaacaaaacccagaaaattcttcacaaaggttatacattttctcaataatatacaaatttgagaaatgtgaagtacatttaattgaattatgtaaaatataacacagacttcatatattcaattcacaaataaattttctaggttctttactttttcatgttcatatgttttttatgaagaacatatggtcacctaagaagaataaaataaaaacccatcaaacagaaatattcatatcctccccaaaccgtattatcttaaacacaattacaaacttatttaattacacaagtgagaatcttaagctgagagaagaaaatttctagagaaatttcttttgttcattataggattatttcaatactgaaggatagtcttcgacattagaattgcttccttttaaagtgtacaaatgccagtgtaaaaggaaacatcataacatccatttcagccttaattttctaatggctcaggccgtttttatacagtgtattcttctccagtstcttaagatagtttggaaacagtacctgttgaacctttcagagagcagtctaccatatatcccttgatcctcaatttctaatttagattcatttgtggttgttacagttataagtaaygtacatttaagaaagatatatctgtagaacagtttctgcacttatatgtgtatataaattatatgtctgctaaattttttttggcctttgtacttgaaaaaaaattaacagatgttaaaatatttggctcacaagcaatgttaaaaacaatctgtagataatgcttccttatttttcttggattaatgtaaaatcaggattaatttgctttgtgtacctgggaaataatctcgtttgtatgcttgtttctaggatgtcttttactcttcataataataaaaaagtcagtgcatgtcagtatatacatatccttcttgattttatctggaaattattaggtttgatctcaattatttatcatttatatccattagctttttaacccataattgtcattattaaaatttttttcatgtttrctactgtgaaaggttcatggaattcactttgggtatactgaaaacattatatgtgaaatactttgcagagattctagcacacagacaaaattcagtagctgatatttagagttattattcccagtcttggagttaatcccaaattgaggatttcttcccaatactgccaagaaattttagtataagggtccagcaatgtttgctcttgcctgtctgtgctgacccttggccactacacaagtcccgagagagagtttataatacctgatgacagatgtttctgataatttcagcattgtattatgaccctctagattaactacttatgagttcctttatgactttggggacaatctccaaatctcatgctgtatttcctaggaagcagctattccctatagctgttgcttgtttttccatctcactactccacagacactctcagttagtatgtgtaaggcccagcctgtccttgctgtggttgaaacctttatgcctgactatgtgagttaaaatatttctaacctgcacaccaatgaagcactttaccttaaactatcacatatactgataactacacgatacaagattgattcattcattaataaaatctcattgtacattctcttaaaataatggaaactattcttcttccttttctaattatctctcaaattgctttatcatcggttaccaatagttagtaaagcagaactgtgttacatgaaccatagatttagcatatgtttccatttgttccagtggcagcctgactttaatgacaattaattggttcaaagtctaatcactttgattaagctgactagaagcagggaaaaacaatcaatttctgtgcctttccttccattataaaagaggaaacagggagaaagttaacattaattgaacactaccttttttaaaaaatgtgttctatgcttcgtatatattacattaaataaatttgctctattcttctattgtgcaattacatttatatttctatgaatgtataccaacttacagtactgcaaaatgtaacatgtagagctctttgtatgaatcctatggatttagtaatttatagtgtttttaaaattctgtttcacacttaatgttcatgttgtctcaactgtaaaattatgagctatctagtatcacatatattctcatgtagtccttcagtcaagctaggtctacaaacaaccactaaaatggccatttttgagtcaactcttttaatctcagctatcttataagacggtgataatgatacaggtgatgatgtctatgctccattttatggaccttgttgattattatgccttaatcccagcagtttgggaggcccaggcgcacggatcacgaggtcaggagattgagaccatcctggctaacacggtgaaaccccgtctctactaaaaatacaaaaaattagcagggtgtggtggtgggcgcctgtagttccagctactctggaggctgaggcaggagaatggcgtgagcccgggaggcggaatttgcagtgagcggagatcacaccactgcactccagcctgggctacagagcgagactcctctaaaaaaaacaaacaaaccaacaaactaatcactgtaataactcagtttttattgtttactgttgtattagttcactagggctgtcataacaaagtactatggactgggtggcctaagcaacagaaatttatttcctgacaggtttggaggctggaagtccaagatcaagatcttagtagagttggtttctgctgaggccactctctttggcttgtaagagggatcttctccatgtgtcttcacacggtcttccttctctgtttgcatgtgtcctaatctcctctttttataaaaacaccagttacattagattagggcaccctaatgatgccaaaattctttaaagactcatctctaatatggttacattctaaggaactgggggttaagacttcaacatatgaatttctagaagagcacaattcaggccacaacaccactaaccctttacaatgtattggagtagataacatatctttccttattcctaaatgaaaaacatggtgtacatgaattttttttttttttttggctaacctgtttagatcaccttgggattcaattcagaaattagaatatactgtttagtagtactaatcaaaactctaaatgtaatgtaatatcaaataattcccccttcttcacattgggcctaatttatgttggcagcctgcagaggcaaaggctttttctgttttacgacttaagctttttttttattcctcactgttcctacccactcctaaattcacccagtctgctaatcaatttattttttattttttatttttttattcttccagagtggcaaagctgtaagagaggtcttacttgaactggtttgtataactccttcctgttctctggcctgccagagatttaaagctccctgtcctgagaccatttggattttcttagagattcccatctctgagcacctcttaactgaagtgcaaagagagaggacaatgcatattttataagtgagccactttttgtgaaaactctgggaggcaggctaaccttaggcagtgcagtcagctccctgtattcagttgtcacaagccagccttatcatgtgtgagtcaggccacagcctgccatattctcaagtaccagaagcatataccaagctctccaactggcatcctgcataatttgcaggtcccagtgcaaaatgaaaatgcagaacttatttttataaaattaccaagaattccaagattgtagggatctgtgtgattgcatgggttgcaagctcaagaacttcctggccttgaatcctcctcttactggaagctagaatcccagcccatctcctctagagggagggcaactaatctctccaggcaaaatcttgtaatcttctccatattctgatactttccattatgggttgaactgtggctccccagatgatatattgaagtactaaccaccagtaccaaaaaatgtgcacacttatggagatagtcctcatgatgaagtcatactggagtaagatgggcccttaatctaaaaggactggcgtccttataagagaatagagacagagaaaagacagccatgtgatgatggaagtagagactggaatgatgcatctacaagccatgggacaccaaggattgttggcaaacaccggaagctagaagaggaaaaagatgattctcccttaggtttcagagggagtatggcacttctgacaccttgatttcagacttctagcctccagaactataagacaataaatttctattaagcaatttactaggtttctattaagcaacctagtttgcagtaatttgatacaacagctccagcaaaccaacatacctccttttcctcctcatgctggttgaagtgtctaaagtcacgaaatcagatttccaaagtgtctttgcaaattttgcacaggaaaatctgattttagattgtcattgcaaattttgcatagggaaatctgattttacatttcacatttattgtatcttggtatctgggctgaaattttaacatccagttatactttccaatagtataaaatcaaccattttcaaaatacttttatattatagctgtatcttcataaaggtgttttataatgtgactaggtgatttcctgattttatgtatactttattgaagtcgtaatgatttctgcttctgaatttatattgtaatcaaatgagtactatctataatggatgatactacatataaagccaattcaaatctcaattccttttaatctctgtatttttcttttcatagatgatgttttagtccgttctcacactgctataaggacatacctaagactgggtaatttataaaggaaagaggtttaatggactcacagttccacatagctggggaggctcacaattgtggtggaaggtgaaggaggagcaaaggcacatcccacatggtggcaggcaagagagcgtgtgcagggaaactgccctttataaaaccatcagctctcgtgagacttattcactatcatgagaacaacatgggaaaaacctgcccccatgattcaattatctcccaccaggtccctctcatgacacgtggggattatgggagctacaattcaagatgagattttggtggagacacagccaaatcatatcagatggtaagcattctttctttttcacgtacatgtatggtttgttctggatttttctttttagggagaatgtccaaagacattttacaattcttcaaatacctaaaacatctaaataatttcaaggacttctgtgagaaggatctaaaatattctgttaaattaattttatataatgaaagactaggtgtccacattttttttcccagttgtattatgtttaaaatcctaatatatgtacagttacttcttttaaaatactcttttttcatgaccctttacaaaaactacaaacaaacgttttctcaaatctctagcatgagcctgtgctaatgaaaccttgttccagcagtacacgttacaaagtaagaaagcaaaggcattgctgtattattgggacctgaatcttgtctctttctgcaaagatctcaggaattaaatgccctttacttgctttatcttgccacagggtttctttctttcctttttttaatccatagatgaagaggggtgtgagtgtgtatgtatgtacatgcatatacacaggcaaacttcagagatactgtgggttcagtttcagatcactataataaaacaagtatcgcatttaaagcaaggcacatgaatttttttgttcccctgtgcataggagttatgtttacaccatactgtagccatattaagcgtgcagtagcattgtgtctcaaaaaacaatgtatattccttaattaaaaatattttatcgttaaaaatgctaacaattatcctagccttcggtgagtggtaatatttctgctgatggagggtcttgcctcaatgctgatggctgcagactgaccagagtggtgactgatgaaagttaggtggatgtagtaattttaaaaaataagacaacaatgaagtttatcacatcaatcaacttttcctttcactaaagatttttctgtagcatgtgatgtttgatagcattttactcatggtagaacttctttcaaaatttgaattaatcctctcaaaacctgacactgctttatcgacttgagtttatgtaatattctaaatactttgttgtcatttcaacagtgttcacagcatcttcaataggagtagacaccatctcaagaaaccacttttcttgatcattgataagaagcaatgctcattcattaaagttttagcttgagagtgcagaaattcaatgacgtcttcgggctccactcctaattctagttctcctgctatttccaccttatctgaaattatttcctccactgatgtcttgaacccctcaaagtcatctaagagggttgggattaacttttcccaaactcctgatattgttgatattttgacctcctcccatgaatcacaaatgttatttacggtatctagaattgtgaatactttccataaagttttcaatttactttgcccagatctattacaggaatcactatggcagtgagaactttagaagacgtatttcttaaatagtaagacttgaaaattgaacttgctccttgatctatggtctgcagaatgaatattgtgttagcagacatgaaaacattaatctccttgtacatctccaacagagctcttgggtgactgagtaaattatcaatgaggagtaatattttaaaaggaatctttttttcctcagaaataggtcacaacagtgggcttaaaatatttagtacaccatgttgcaaacagatgtgctataatccaggccttgttgttccatttacagagcacaggcagagtagattcagcataattgttaagggccc

SEQ ID NO: 97378 - DNA, 65234 bp, Homo sapiens
tcatgacattatatagcttctgtaaaactccactgttcacttgtgaatatgaggaaaaggcaaataacatcatagtgccagtataaaaattttgatctcacatattccctgaaaaggatcttgaaggttcaataccacatcttgatagtgatcaagagatacattaacttccttttttctgtctgtgactcttggttagggcaaatttcaaatccattataatacatacattgcagcaacactgagtttcttataataggtactatccaaagctttcttttttttacatgtatcacttaatcctcacaaccacctgaggattaataccatttacctgtcttacagataaggaaaacaatcatttttcaattatgactatgcccccaaacactggtttggatggagccttcactggtatagagaatgaccttcttcccttagactagactctggctataataaaggatggtttaatcatcccctgaagcaatgcataagataatctgcaatgtatcttcacatactgtaccttatttgataggcaagagacccataaaggaagctgagcatggattatcagcttcatcacaaatctgaagaaactgacatttatgttatgttgccttacccaagttgggacatcagagcagcaactaaaatccaggtcttcttcctattacatgccgtaaaaggtattgtttctttccctcccctcaaaattttcagtcaaatgtcagcttttaggaagagccaatcactctgaactagaattgttctcttcacttaaaatttctcaagcctaacttctttttgggtcctacaagccgggaaaatacctcagaattggaaccacatgtttacagtataagaaatgacacaagtgtgacttgggcaaaaagaggataactttccccttcagagaaataatccctttatccaaggcctggagattagtgtttgaggtagaataaaagcacagtaaaatgattctatggtttgaattttggctcttctgctcaagtactttctttggtagtatactaattaccactgaattactaattattaattattattaattactaataaaagtaaaatgtagtagtggtggtggtctctttgagttattgaacattaagtagcaaacattacattaagtactttatgtacactctttcacttaccatgtccttgagatgattatgactaaatttaataaatgtccttttgtgcactaacccatttaaaccccacatccttgagataggaataactattacttcccgcacttgcagaacagtttataactgctacagccaggccttagctactatgcaatattataaaactaagagtacaaaaacgaagaaatcatgaaagtcccttcagtacagccagaaaagaacacttctaattactcagagaaatacatgttgtgccagtcgctttatctcctttagcgagggaaatcttctaaggtcttcaatgacataatgtcactgaaactattccctcacacttaaataatgtacatgaagataaaattctaggctgtaattttcttccttcgacacactggaaattttactttttatcttactattaaaacatctgttatcggccaggtgcagtggctcacaccctgtaatcacagcactttgtgaggccgaggcaggcagatcacctgagttcaggagttcgaggctagcctggccaacatggcgaaaccccgtctctactaattaaaatacaaaaattctgggaatggtagtgggagcctgtaatcccagctacttgggaggctaaggctggagaactgcttgaacctgggaagcggagattgcagtgagccaacatcgtgccattgcactccagtctgggcgacaagagcagaactccatctgagaaaaaaaaaaaaatctattatctgatcaatgttcctttgtaggtgacctttctctgaaagatttctaagattgtttttgatgctcttatttgctctataatgcatacaggtatagggaatttcttgttttctgtttaacagttaacaaatgaggtctttttttttttttaagtaagaaacaaggtatcgctctgttgctagactggagtgcagtgacgcgatctcggccacatgatccactagcctcagcctcccaaactgctgggattacaggcaccactgcgcccggcctcatttatttctttaattctaggaaacagtattttttttaatccagtgtattcgcttggtttttctagctttattactgctttgtttccaacatgctgttatatagtggtgacaaaacaaacaagatgctcaatctcatggaaattatgaggcagacagattagcaacagtgggatattttgcaggggagagggagaccatacattctaggtgaaatgtgagctaagaccaaattagcaagcagctatcatgcacgtatctgagtgaggaacacagctaaacgtcaattccaaacaataacgaattgatcaatgatgaatttaatctcagagttgctggatgcctctcttcaggtctgctcagacctcaattttccaatcttgtcccccaagaaaaagattaaacctgtcttgtgctgagtagtgtaatattccagtacggcttctcttgcgccctagtgctagtacgaagagaaatcaatgaaaaatgtagaaacaagtttgagtacaataggaacaggaaaaagcaaagcttcttgccacgccatgctcccaaatgtgcctgtgtctgattctcagcactaactactcatgtgagacatctcaacttgataaaacattaaaatggatttttgtctcacaccattcaaatacccagacagaataattttagtgttcagtggcacttccaaatcctaactcaagtacagtaataaatggtagagacttaagagaggcaagatatacatgtaactgatctggtctcacgagggattctcttacaatgtatttcatctacagtaagagaaatcatcttattaacattccccaaacttcattacttaacacacctatcatagtttttgctatgcagaattaatccatggtaatacggattatgaaagtgaatcaccctgagatggggttattaactaaaagggcaaagagaagctaatgaaatgctaatgtggatggtaaagtggtggatatatactgggcgcagtggctcatgcctgtaatcccagcactttgggaggccaaggtgggtggatcacctgaggtcaggagttcgagactagcctgaccaacatggagaaacctcatctctactaaaaatacaaaactcgccgggcgtggtggcacatgcctgtaatgccacctactcggaagatggaggcaggagaatcgcttgaacctgggaggtggaagttgcaatgagccaagatcgcaccactgcactccagcctgggcagtaagagcgaaactccatctcaaaaaaaaaaaaaaaaaaaaaaaaaaaaaagaggtggatacagacaaaaagtgtaaatcaagctagcgcttgcaagatgtttatattgtactgaaagaaaattgtgggctgggtgcggtagcttatgctattgggaggccaagacaggaagattgcttgaggccagaagttgcagccgccagaagttgcaacagtttgcaaacaaggctttaaaaaaatttaaaaaaacacctcaattctacaaaaaaatttaaaaattagccaggagtactggcacacgtttgcagtcccagctgctcagaaggctcagtgagaggatccctcaagcccaggagttggaggctgcagtgaattataatcacgctactgcctggatgacacagtgaagaaaaagaaaaaaaaaaactaaaaaactgccatatctgtgttatgactatactgttttacaaataacatttctttttaaaatgaaaaaagaaatgaaagagacctttctttgaccactttaattgtatgagttgtggtagacagtatttagcatgacaaccactcatatattattttaaaaatgtcctaaaataccttagagaagagcaacagttcacatgctactcttttagggtgctgtaagaaagacagtgaaggatatagaagaatttaaagtgctaagactcaggaagacataaaagatacagtgacatgcttgcagggccaatctataattaggctaaaggatatgtaagatttctaaaaaggacaataggaaaaattattaacaagttcatactgtctttagacctcatttatcctcaaactggaaactgtggaataagttttaagaatacatttcaaccaaatgtaaataaatttataaacatattctagactaatttaaatagaaattcagaatgaaataattctttgaaataaagactacggaacttaaaactatcagaagcacttaatgttcttaatgtaaaaattagggctttgtaggcttcttataaaatcttacctcaggccacgcagtggctcacgcttgtaatcccagcactttgggaggccgaggtgggcagatcacctgagatcagttcgggaccagtcaggccaagatggtgaaaccctgtctctactaaaaatacaaaaatcagttgggtgtggtggcatgcacctgtaatcccaactacccaggaggctgatgcaggagaatcgctggaccccgctcggaggcagaggctgcagtgagccgagatcacgccactacactgtagcctaggcgacagagcaagactccgtctcaaaaaaacaagacaaaaaaaaaacttatctaaaattgctaagactaaaaaaatcatataccattgctaagacattgatgaaagatttcatcacacgtttgcttggaaatgttcaagtaccacctttaccatacctcttaacaccttcaaaatatggaatagtgactcactaaagaaataaagccaaaaagtattttttatactttgatcaggttctcaaagacaaggcctagtttaagaataatttttcatgtaagacaagacagggagtatttgtttctacatcatgaaatgagtccatctattcccctctgtcccttactaaaatctggaaactaaatgactgtaaaaaatgaaacaggtgttaaacacccccagacaataaaatagaagcaatggcaaagcaagattttgggaactgaaaaataaatggatcagtgttaactgactcaatagacaacagaaatgaaagtatcagtgttagatagaggttttcactaaaaaacccagaagtggttgaaagaagagtcaaacaccatggccccatacctccctgtaaagtaattaccactccccctcacagtgtaagaaatgtcacgactaactcactgaaaagggtgaatcagtctggaataggggaatccacatatagacagggtagagtattttactgaaaactgaggaagtctacattttgaacagtaaaatctctaatacactgtccctcctcctcaccccaaaagaaaactggcaaagtacatatactcacacaggacaagtgattagagaatttctctcagatatatatgtacatattctctctcatatacatatactgacaattgggtgaccctcaaataaatggtctagtgaaatcacactggagtaaaatccacctgttgagaaccctcatgcatggagcttagagagatttcttctagctcttaaatttgaggaacagtaaatgatcccaaggcatttgaagaagcatcaaaataaaagacagactaaactttaaaaagggaagaatcatttaatgaaacaagactatgcagatgggggaaagaaattttgttacgagttctaggcagaagtgctagtggtggtggctcatacatataataccaatgctttgggaagcaaacataggaggaccctctgagaacaggaattcaagacgagcctgggcaacatagcaagaccctgtctcaagaaattttttttttttttttaaattatctgggcatagtgtcacatgcctgtagccaagatattctgaaagctgagatgggaagatggcttgagcccagaaattcaagaatgtagtgagctatagttgcaccactgctctccaacctggacaacagcaagaccatgtctcattcaaamaaaaaarttctaggcagagaagggaccacacattcaaaagacaaaaccctccaagaaatcattctaaaaaatccccatgaattaaaagacagattttcagactgagctgattcaagagtaaaacaaaacaaaaataagatacacaacataaagatgggcatggtgtcacatgagtgtagtccacattacttgagtgacayagggggaaagataacttgaaaccaggaattcacaagtctgtgcaacatagcaggagtctctttaaaaatgaaaaaaaaaaagaaaaaaaaaaaagacccataccaagacacatcactgtgttattaatttagaatacaaaagacaaagaaacactggaagctcacattaacaaaaggctggttccccccaccttcaacagactggaaatcaaagcagcattcgggccaggtgcaggagctcacacctgtaatcccagccctttgggaggccaagccggggggaattgctggagcccaggagttcaggaccagcctgggcaacatggtgagaccctgtctccacaaaaaattaaaaatttagcagggcatttggtgcatggctgtggtccaaactaaattggtggctgaggcaggaggatcacttgagcccgggaggtcaaggctgcagtgagctgtattcatgcctaggtgacagaatgagaccctgtctcaaaaaaaaaaaaaaaaaaaaggaaccattaattttctctcccacaacactggaagttctgagacaacacaacaactttcgaaattctgagaagataataattcctactctaaaatcccaaaccagaactatccatcaaatataagaatccaacaaaaatacagccagatatgcgagttctcaaaaaattcatttcccttgaattcttttcttgggaaaacacaagacaacataatccatcaaagtgagcgagtaaaccaaggaggaaaaaaagttagatccagccaggcgcagtggctcacacctgtagtaccaacactttgggaggccgaggagggtggatcacctgaggtcaggagttcgagaccagcgtggccaacatggtgaaaccctgtccctactaaaaatacaaaaattagctgggcatggtggtgggcgcttgtaattctagctactcaggaggctgaggcaggagaatagtttaaacctgggagacagaggttgcagtgagccgagatcaagccattgcactccagcctgggcaacaagagtgaaactctgtcttaaaggaaaaaaaaagggggggggggggagacacaagacacaktaaacagtaattccaaaacatgaaacagccaacaggaatacccaggagtatggtaaaggaaggttccagatggaatcagttctacagtccaaactagaagaatgttccagggagtagaggtgatgggatatatttggagggggaggtttattactgaatcatgagatctgttttaatatactgaggggcttatatttccagagtgattagatataaattactggtaggtaaaaaacagttaagtattaactcagggagaaaaaaaaagctgcacaagaatgaaaataaaatcacagcatattccatggcttatctaaagctttaataatacttacacagccataataaaagtaattattgagccaatcaaaagttatataactacactaaaaagatgtaagggatcattatttcatgttgaagtggtgagaggtggtaggaatgcaggcttttcaagaaggtatttctaagaatttttaagcatttgctcttaaatatgaggaacagtaaatgatcccaaggcatctgaagaaacatcaaaataaaacactaaactaaggggaaaatcaaatgaaacagactatgtggggggtggcggggggtgggggcagagacatgacgacttttatagaaagtaggctgggcgcattggctcaggcctgtaatcccagcacttagtccgaggcagatgatcagttgaggtgaggagttcgagaccagcctggccaacatggtgaaaccacgtttctactaaaaataagaaaattagccaggtgtggtggcgcacacttctagtcccagctactcgggaggccaaggaatgagaatcacttaaacccggggggcagatgttgcagtgagccaagatcacaccactgtacttcagcccaggtgacgaagtgaaactgtttataaaaaaaaaaaaaaaaaaagccagatgtggtggctcacgcctgyaatcccagcactttgggaggccaaggcgggcagatcacaaggtcaggagttggagaccagccttaccaacatggtgaaacccagtctctactaaaaatataaaaattagccaggcatggtggcatgcacctgtaaccccagctgctcaggaggctgaggtaggagaatcgcttgaacccgggacacagagattgcagtcagctgagattgcactactgcactccagcctgggcgacagtgcgagactcaaaaaaaggggaaaaaaargaaagaaagaaaaagtacaggcaacaagatttcctttagaatcagacatgaaatatgagggaaggaagagaagaatgactctaagatttttggtttaaataactggaagaataaagttgtcatttattgaactaaggaaaatgcaaaagaagtaaatttggattaaacaagatgaaaagtacagatatagttatcaagcacctagtaaacagtcggatatgtgaatctggaattcaggagaaaggttctggctggagatataaatttgagtcaccagcacagttcccattaaagaaatgaagaccatcaagggaatcccaaactaggcttaggatatttcaatgtttagaggatagaaaaggaaacagcaaaggaaactgagaaaagagtcagagaaataggaagaaaaagcaggaaaatatgtttcctagaagccaaataaagtaaatgttttaatggagaagagtcaacaactgtatgaaatgctgctaatagatcaagtaaaatgaggtcactgacgtcacgagaccttaaaaataccagctccaatggaaatgaatatctgattggaatgggttcagaaaaaacagaacaaactaaaaacaatgaatacaggcaaggagttttgctataatagaactctttttcaaggagctttgttataaaagaaatgagacattgcaattggctcaagctacgacaaacaatatatccgcagtatataataaagggcagatggggacagatgggcacagatgctaggtttacagatgcaacggtgacaacttttaaagattcttttctgactgcgtctattttctcagggcaatagggagcaaagtgagagggaggagatatgagacgtgcaatgacagagtaaaactatgaaaccagtcatttaggacaatgtaacaggaaagactgggtcactaaggacaagatcacgagtttcaagcaagcctaggtcagcatgcttatgtaatgggttaacattttgacttaaaaaacaaataaacctgctctatagtcttttatttaaccaaatgttctatctgaagtttttcttcaccaccaaagaacttatccatgtaaccaaaacccacctgtacctcaaaacgattaaaataaaaatttaaaagaaaagacctgtgccaataggacacagggaaaaaaaattaagtttttcttaagtgacggttccattatccttaacagatcatctgatctgcatttgaatatacatggcaacagcaatatttttccatgaaataaacactaacacagaaatgtatggcttatggagtatgtcccctctccagggtacattcaggatttctcttcctcattgtctgatatcctttcacacagggtctaaattgtgccycttttggcctttatgctkttctattacagattgtgcattacttacatattcctaaggcctattctcttatatttggttctagttaacccactactataaattttcagggtctgtcttgttttgcatgatacactaccatttccaatttctagtcgtttctcaagaccctaaagtttcattcagaaacttctcttgtgctaacacaatgtccacttgaaatctctatatgacacactcctatagtactagtgaatgaaaccaagaaaacaaaataaccaaatcctaccgacagccaagtcttttgctattattgcacctaagctattcctgaagaaataatttaatgagatcatcttataaggaacatttatttggtaaactatctcatagaaatagactctaaaatcaaacagtttcttaaacaacagaragcataatcccaatctctccccatgaaaagcctacttcataactgaagtacctaaagcccatgaactgcattactagaagaaaggagggaaaaagacatttactaaacttccacaggaagactgtataaatctggaagtggttaagtacacatcagcctgtatccaagaatactactcagtctcaaaaattaactgaaaatctaaacttaatatggatacttctttgttcttggtaaggctcagaaaattaccatctatttaagtacgcatggtactagttacatgtcaactgatataataaaaaaggkgaagtggacaatcagtatttcaaacccaatacagggaaatcactagatgtaaataagaacttttaaaagctattcttgagctccactttaaaacaaacattcaggactggaatcttcagaattttctaatatcttgaatatccccatcttctctttaattggtcctgaagcattcatttgatctaagggaaaaacattaaaacaggtacattttagaagtataagaagaagaaatcgtaaaagaaacatccaatatgatgttatgagaagtgagtcatctgtccaaaattataaaactcacagtaatacagggcactctcttccttaatcaccaagatttaatagcagtgaaagcaaaaaggtacactattcttaatacaacaactagaatcagactcttgggagcatacaatctaaagcatcagtttgctagtcaaaatcgcttttgctgaatttaaggtaagataaacaagtcaaagagcaataaataatatcaatttgaatcatgttgtcagaaacgttttaaaaagaggcccaatcacgattcgtttaatagctgaaaacacaccacaaaaagcttaccttgagaaacattttgaatcaatgacaatatgtagtctcctaaatttttatcaacatgacagctgtgaaatgaaatctgattttcatttgtattactgatttctaatcatccttgtctgttcatyagacatttctttctctcttggtaatagcctgctcttatattatccgttttcattatcaacttttatttacttgcatatcctaaacacttcctgttatatgttgcaaatattatttgtggtttgtctcttatctctttatggtgtcatctgtcttatagtagtctttcctattaatgtaattaaaatctatgaaacctatcatataatttgtgatttctgtattataaagaattctaattctaaaatcataaatatattttcttgtctttttaggttaaaattctacctttaatatttaggttttgaacacgtggattgttaatttatctgaagtttgtaagtgcagtgtgaggagaggagaatctaagttaatttttcccctattaattactatttccccagatcatctattgattaataggaatttcctatcagttgtttgaagttccatttcacatttattagcttttcgtgaaagttgtctttctagattcaccatattgtacttctagccaatatatcacaccatgtgctaattctaccatcttgattattatgacttttaaatttttaataagactttatacctggtatagaatatcttgtgcttcaaaactgtcttggttctggccctttattactctctcatataaattttaacaacagtctgttttacaaaaagtcattctgggatttttttttttttttttaagagacagagtctcgctctgtcacccaggctggagtgcagtggcacaatctccattcactgcaacctccacctgccaggttctagcaattctcctgcctcagccttctgagtagctgggattataggcacatgcctccatgccccgctaattttttctattttagtagagacagggtttcaccgtgttgcccaggctggtctctaactcctgagctcaggcaatccacctgcctcagcctcccaaagtgayaggattataggcatgagccaccacacccagccatcattctgggattttaattagaagaaaaattcaagaatataagttagttttggggaccactgacttacactttgtagtaaccattcatatccacaaatacagctaaatctgcatgtttactcagtctttctattaacgtccttcaatgtttcataattctgtccttatataaacatgttaaaaattgttaaactttaattgtaggcatgttaattttgtagctgttgtaaaaaccttcattattaaacaattattgctgttacacatattattaataagcaatcttcttaaattctattttaaaagattctggattcccttggacttcctatgaagataatcaaaccagaccacttgcaaataaaagcagtttcgataatgccagcactttaggaggatgagscagacagatcacttgagcccaggagtgtgagaccagcttgagcaacatggcaaacccctgtctctacaaaatacacaaaacaaaattagcaggacatagtaatcacacctgcagtcccagcaacttgggaggctgaggtgtggggattgattgagcccagcaggttaaagctgcagtgagccatgatcacaccactgaactccagcctcggtgacagaacgagactttgtctcaaataaaaaaaaattatgaagatgattacgatattatggcaagttggtttttggtatctaattaggtgatcatctagttctccattatttaattgatatgaattatattatcagatgttaaacagtccttacatgcctcacataatgttgttttttaatatagtttagatttgaccatgatgctgtatgtctcatatttctccctaaactatttcaaagttaaaactcaaataaacatgcaaataatccagaatatctaaaacaattttgaaaaagaacaaaactagagaaagtacacttcccataaagctaccttaattaaatcagtgcgatactggcataggaataccacagagatcaatgggacagaattgagaatacagaaataaatccttatatttatgatcaaattatttgcatcaaggatgacaaggccatccaatagaaaaaggatcatctttttaacaaattaatattgacatgcaaaaagatgaaaattcattgaaaatagatcatagatctaaatgtaagagcaaaaactataaaactattaaaagaaaatatcaacaccttgaattaggcaaagagtagttacagatgacayaaaaatcatgagtgaacagaaaaaaatttgttaaaattgaaattcattaaaatttaaaacttttgctcttcagaagatactaagtaagtaagtgaagagacaggccagagtagaagaaaatgtttggaaaatacatctgattaaaaaaaaaaaaaaaaaaacttccaaccaatatattttattttgattcaataagacacagaattgaattttaaaatgaacaacatatttgaaaataagatatcatgacactgtagccagtgccacgcaggtaaatgtttaacaattgggtctcaaaaaaaacaaaaactgaggcacaatggctcatgcctataatcccagcttactccaaaggctgaggctggaggatcccttgagcccaggacttttaggctgcaatgagctatagtcgcactcctgcattctagccaggaatacaaagcaagacccttttttgttaaaaacaaagactggggtttctagtttctgcctgtatccgtgatatgaatgttactgccatcaccaatttcaaaagaccaaaatgtcacggaatacagttgggaaaaaaagattatacagtatctccaccatacagatgcaacagacaaataatcaatagcctagacgacagtaatatgttgtaaaataattaggaaattatgaagtacaaaatattatttttgttttcaaaataattcatggtcatcactgtaggcatcagatcataaggtggtattctaaaaactgataaaaaaaaaaaaaagaagcaatatatcctggctctcttctatctcagggaaactgtaagggaaagttcttaaataacccagctaataaaagaatgacagaacaagaaaaatcaccattttgcaatgattaagttaataatggttcttatcagccactttcaagggatactaaaaatcaccacgttaggcttggtgcagtggctcatgcctgtaatcccagtgctttgggaggctggggtgggcacaacacctgaratcaggagttcaagaccagcctggccaacatggcgaaaccctgtctctactaaagatacaaaaattagccaggtgtggtggcaggcgactgtaatactagctactagggaggctgaggcaggagaatcccttgaacccaggaggctgaggttgcagtgagctgagatcgtgtcagcgcactccagcctgggcgacagggcaagactctgtctccaaaaaaataaaataaaataaaataaatcatcgtgttaagtaaaggatgaaggctgacaagacactttataacattatcttgattaatcttagctcactggaaataagaaatccagatacgatgtgcctcctggtatgacgaaaaatatgagaacaaagcactggtattcttaactaagacaggaacttgaatatattcatttacaagtgttatttaccagtttacagaaaatatctgaattatggaagaagttaaagataatgacatttatgggcaaaatgtcaygtctgagatttgattttaatactctaagaagaaaaatgacaataaaacaagattggatacatgtggctgaatgaattgcacaaggggttcattacattatgctaattaagtgtatgtttcgaagcttccattaaaaaaaagcataatacttaccaataagatcacttcgatctaacaacaactctagatctttatcactaatgaccttctctcttgatccttttatttccctatagaaaacaaaatattcaagtctatgtgaataattcaaagctacaaattaaatctttctaaaattaaaaactcacctttcataatctctagattttaataattccattaattccttaggatctaagaaattcttagacagatttaatccagactgaccacctttgaaatgatctaaaaaaaatgagaaattaaaaacattaaaattccttttaaaacwacaatacaacatattacaaaccaatcacaatggcttgcattaagaaggacggcaaaaaaaagtgttgataaaaaataaaagcaaatgaagctctcaggcttcgctggtaggactggaaaatgatatgtccactttggaaaaggctggtagtttccagtagttaaacacgcaccctccctaagatcaaggaccaaaaaatgcattatgtccacaaagacttgtacaggaccaacttattcataataaccagaatctagaaataatttaaatgtcgaccaacaggagaatggaaaaaacaaactattcaccaattaaaagaaaaaaattctactaaaaacaacacagatgactctgtgttgaaaaaatatattcaacaaaatagctaaacaraaaaaagactcatcagtgtgacaaaaatcagaatactggatgcttcctagtgatggtaaggggagcataggaattactggaaagggtgaacaaagaaaatttcttggatgatgaaaatgctaccttgatctcgatgatagttacataggagtacataaatctggtcaaacttcattaacctgtacatttaagatctgtgcattttgctgtatgtatgtaataactcaactgaaaaatgtcagcatttaaaaaaatcccttcaaaattttctacaaaattaatctactaaaaaatcgaaaatagggctgagcacagtggctcacacctataagcccaacacttgaagaggctaaggcaggaggatcactwgagtccaggtgttcgagaacaacctgggtaaaaaagttaaatggtctcttaaaaaaaaattatgctttttccccaatgcaagttccaattacaatctaaatgtttcaccaaattaattttgtctaaaccttaatacactcttacctcaaaacccagagaaagtatttacaagtggaaaaggagtataaaataaattattagtgatttccaacattacttttcacattaacattatcatgttcccatttctctagggcttgatgatttacataaatgattttcaacatttcttcaggtagctatcaagccatttattcaaagaaaattttatggtgaatggatagaagtataacttctctaaggaatctcaggaacaaaactttttcacctatgtcagttccccacctcctcagaattttttctagattaaaaagcattgttgagacccatctggttatgataaggaaatgaaaaaggaaaaaaaagtgtccaaaactataaaaagggcattctgcagtgaaatattctgtgaaacagtgggttcaataaataaatagattttttataacacttaaatacacttaatattttaatacatggaacttgcaaaatatttatcttaaaacttttagcaagccaatctcttatcaggaacatgtagttatccttgaccccttttctctgcccatctgctcttcatctacatatctacatactcgctaacattctttcttttatgtctatgrtgaccaacttagtttaggctcccaaattccccactgcttatttaaatcctgtcatatcaggctgttaatatttttttttttgagacagagtcttgttctgttacccaggctagagtgcagtggcacgatctcggctcactgcaacctcctcctcccgggttcaagcgattctcctgcctcagcttcctgagtagctgggattacaggcgcccgccaccgagcccagctaatttttgtattgttagtagagacgcggtttcaccatcttggccagcctggtctcgaactcctgacctcgtgatccactcaccttggcatcccaaagtactaggattacaggtgtgagacacagaactcggcccaggctgtaatattttataaacaaaataaaaacaaaatccacaacacacaatgcacaatttaaacaataaagcactacataagtgttatttacttttatggatgatcaacttttccagtttccttttagcagctgctctttccacaattttctgatcgatagtatttgctgtaacaaggcgataaacaacaactggctttgtctgaccaattctatgacatctatcctgggcctgaagatccgactgggggttcttaaagttaaaaagaaaaataatatttaacggtattaggttaaaattaacataaactcatgtggataaagtcaacatgaatgatctagccaggaacttttaaatagtggtgtcttaatttaaacttccagagtggcttcatagacaaaattatcattccacagatccttgacaatattaacaaaaaagtttaaataccctaaagaaaacatttcaggatgggcacgatgactcactcctataatctcagcattttgggaagccaaggcaggaggatcatatgaggatacaagaccagcgtgggcaaacagtgagacgtggtctcactaatttttacattttttgtgggcatggtagcacacccatagacccagctacttgagagaatgaggtgggaggatcacttgaatccaaaaggtcaaggctactgagccgtgatggtgccactgcactcaagcctgggtgatagtgagaccctgtcactaaaaacaaaagtaaaaaaaaattttcaatttttacttgcaaaaaactttatgaagaaataactcttagctgaaaatgggtatcttttcaaaatagataagtaaatttgtaacatgtaccattaaaaattaaaaattcagaatggccgggcgcggtggctcatgctggtaatcccagcacttaatcccagcctgggcaacaagagcaaractccttctcaaaaaaaaaaaaaaaaaaaaattcagaatggaggctgggtgtggtggctcaagcctgtaatgccagcactttgggaggccgaggtgggcggatcacctgaggtcaggattcaagagagcctggccaacatggcaaaaccccgtctctactaaaaacacaaaaattagccaggcattgtggtgtacacctatagtcacagctactcagggggctgaggcaagagaatcacttgaacccaggaggtgaaggttgcagtgagccgagatcgtgccactgcactccagcctgggcaacagagtgagactccatttcaaaaaaaaaaaaaaattcaaaatggaaatataatcagcatattccttgctatacttccaacttacccaatcactatcataaatgataactgtatctgctgcagtcagattaatgcccaggccaccagctcgtgtactcactaagaagataaacacctctggatccgtgttgaagctgtgcatctaaaagcaaaaaggatgtaaatacaacagattaaaataaattaaccaacaagaytgaaggagaaaaatgttttcaattacaactattaaagacttaaacaaaggaggccaaacaaatcattcagatctataaaacaattatgttaacaaaacctgtgctgttagctttatcgtccaagcacctatattaaagagatcttaattttgttaaaaaccatgtatcacaacaatgtttaaataagaaaagctaatatcaaaaaatgatgaaaaaattgtagttgtctaaacacatggggtgggtgcaggggagaattgactagaagggggcacaggaaactttctgggctgatggtaacattctatatcttaataggggttaggtataaatttacatatgcatttgtcagaaagattcagcaaatgtatacattatttgcttcagtatgtgtaaattttaccccaaaagataaaatatgctgaagtcattacggaaaagggtagtatcatctatattttatttttaaatgcaccaaaaaaccaggattaaatgctgaatggatacagcaaggctgctattacaggaaatgtgtttttaaaaaggtatagtcaaatgttaacagcagattgtaggcggatttacagttgctttttttttttcaactttgccatatagttgatattttcataatagaaagttgaggacagggcaaaaaggcaaaaaatttcctgctatcccaatattcttacagtgatggttaagtaggatattattaataagattgtgccagaagatatatatatttgtgaatcaaaaattaagacttcttagtactaaatcaaaatgtttgtttttgataaaaccacagggtttctggtcatttctatctttttatcaatttgtgggtctatttggaatattacttcagaaatcaagataggaattataaaagaatagtttggtatgtatgacataagtagtcttacgtttttttctctctctgagtaagacatggacccatcaagcctgctgaagttgaaatctctgagatggcagtaatccatcaaaatgtccaacatgcttgtcatttgtgaaaaaagcagcacctgaaattaaacatatcttaatatttctaatgattgataaaaaaataattgaacaatccaaaattccaatcaaaagtaccaccttgtgacctcttttttttagttctggcagcattcgatccaaaatcaagaacttcccagaatttgttaccaattcttcatcgatcttaaggaggggcaaaggaagaaaaaatagagagaaaactgttatttgctttgttaaaacaaaagccatttggaaagttcaattttcaaagccaagtcacttaaaaaacttaaaaactgacctgttattcaatctttgtaaaatcagaagatagttattactcaaagacatactctagaatgtaaaaccagcaatttcacaaaaacaaagtacaaatataactttgatctaacctcaacactcctctctcaaagtcattgtgaaagaaaacaattatgtcaaacttaatgggtacatactcaggcttattctttataagtgagttatttccaactaaatgtatatgtaaactactgctagaattcttaccagaaattaagagaaaatacaggagctgataagtaatctaaatattgtggacaaagactttttcaccttctggtgaaattccctcatgagagagctactttcatttgagtgggaaagttttgtcttccttcttactctaataaagatgtaaagcagtgcctctcaaatggggacaattttgccctccacctatccccagggtatatttggcagcggcagcaaactttttagttgtcataactgagggaagtgaatactagtggcatctaatgggtagaagacagggatgctgctaaatgtcctaagtgcacagaacattacctcctaagaaagaattatctggcccaaaatgtcaatattgccaggagtrgaaaagcctattgtaaactaccttgaaacaactgtgattgagggttactaagaatttatttctattgatattatgctatcattctatcaactacccaagaaagcaacttcatttacttaatttgaaaacctccaaatcaaaactggttttattctatggctacctgttgatctttaagcaatgagcaaccaggctgattttgataagccaaatattaatgataaaagaaatagtgaaaagatgaccactctctctaaaatataacaagtaaacatgcagagtacaaatcaattactaaatttagaattcttagttgttcacataaaatatgtaaataaaaatataagttgcatagaggccaagcgtggtggctcttgcctgtaatcctagcactctgggaagctgaggcaggattgcctgagaaaccaggaagtttgagaccagcctgagaaacatagcaagaccctgtctctataaaaaataaaaaaatttaaaaaactagttgctcatagaaagtgaccatttttctaaccctgataaggttctctgaaatttcggaaagaagactgtctcagcttactgaaggattacaatcttcatgacaaatagcaccatacttatttttaataattataatmaaaaaaagtaacactttccaccaatataaaagtaatggraatcaaaacagtaaattagaattaaacagtattcaccttaaattcttgtgtaacagggtctataggatattcaatcaaatatggatgattacaacatttacgaagtagcatcattatattctgcagcttcagattaacttcagattctacagggatattcacttccacaacagctctaccaaaacaaataatgcatatatgggaaatgcaaaaaatggtcacagtttaaagaatacttaaattcacttttgaattcaaacctttctcggtccacctctggctgtatttgactgatcagtttttccaattcattagggaaatcatctattttgctgtaatttattgattttctagttcgtcgttttggtcgaccagtaggacttaactcaattgtttctttctaaaagggaacgaattaaaagaaattcagtttataaagctatgtccttaggttctaaatgtaaacaaaataaggcatattttatgtacaaaatgacaatctatagacaaatacaaatgttgtgggaaattagtttaattttaacatggacaacaatatctgaaagtaagaggaagggccttcatatctcaataggtaaaaatgaagggtgtataaaactactttgaacttacacaaaaggatttaataccttaaagttgaaatatggctccggaaatttgcagtacagaggatatttcttcagactggtgtaacactgcatgaaactgctcattatgaaattgctcattaacagacaaataatgtaaatttgtaaacggctagacccttcctttaattataattaattattaaaaagggagaagaggccgggtacggtggctcacgcctgtaaacccagcactttcggaggccgaggcrggcagatcacaaggtcagaagatcgagaccatcctggctaccatggtgaaaccccgtctctactcaaaaatagaaaaaattagccaagcgtggtggcgggcgactgtagtcccagctactcgggaggctgaggcaggagaatggcatgaacccgggaggcggagcttgcagtaagccaagatcatgccactacactccagcctgggcaacacagcgagactctgtctcaaaaaaaaaaaaaaaaaaaagtcggggggagaagagtctggtggtcctattgtttaaaaatgcatcacaataaatattttgaaaagaaaatacgtaggtttatagtgtacaataaaaaacctggaaagttaaacaaaacttaagggtctccttcagttacatgataataacatcccacctctatctcctataatatggtgggtgatgaataatcatcatcaaattgattattaatctttttggttatcaataaccttctgtaaggaaactgtacaggtagaacatccctaacgggaaaatacaaatgctccaataagcatttcctttcagtttcatatcagcactcaaagtttcaaattttggagcaactcagattttggatgctcaatctgtatatctggagattagtctagttgccaagtccttagtacagggattctcaaatacctacctgtgtgcttgttaaaaatgcatttccaagttcatctccagaaagcatgattagagttaatctgtacggaaatatacattttttttttatttattttttttgagacggagtttcgctcttgttgcccaggctggagtgcaaaggcacaatcttggctcaccacaacctccgtctcccgggttcaagtgattctcctgcctcagccttcctgagtagctaggattacaggcatgcgccaccacgcctagctaattttgtgtttttagtagagacagggttttctccatgttggtcagactggtctcaaattcccgacctcaggtgatccacccgcctcggcctctcaaagtgctgggataacaggcatgagccaccgygcctggcctaaatttttagtaagtattccagatgactgtaaagcaattaatacaaagattatcacttaacattttagcaggactccagatactaggaaacaacttttgccactaagccttatgccttataccccagttagaaattcacccaagtcctaaaaatgaacaaggggaccttaaaactggaatttaggccaggcacaattgctaaaacctggaatcccagcactttgggaggccaaggtgggtggactgcttaagcccaggagtctgagaccaacctgggaaacatggcraaatgccagtctctacaaaaaaatacaaaaaatttagccaggcaggtaaaggctgcagtgagcagtgattgtgccactgyaccacagcctgggtgacagagcgacaccttctctcaaaaaaaaagggaaaaaagagaaattttatatgtcaagtttcatttacagtacatttcaaaaccactatacctcactggatccaaacatgtttgcaattgtacggttcacaatggctgtataaaagatctcctgcttctttgaaagtggagcataaacgactacttctcgtttaggaggaacttcaagagcaacatcagacttcagtcttctcaataagaaaggtgttaaaatctaaaattaaaacatgaacagaaaaatatgagtattaaacattcttgtttttcaaggaatactgtccccatatactcctttaccttatcttttgacttcmtatataaataatgccaaatctcaaaaggtgaaaatatcttgagattttcccagaccagaccaaatgataaactcacagttgtccgcagcatttcagaatttattttcttttaaaaactgtaagaatctatctcaaataattttaaaagtaaaaatataaaggtagcatttgtatttcttagggttgaagtttcagttatagcccacaacttttagaatgagatgttatcagcaccatacaaaaggggaaataataaaaatgaataaaaattaaaaatatttgaaataatgagtacaaaaagtagaaataataagacctaatatttggtagcacaacagggtgactacagtcaataataatttaacttttacattttaaaatataaagaagagtataactagaggccaggtgcggtggctcacacttgtaatcacagcactttgggaggccaagacgggtgaatcacctgggtcaagagtttgagaccagcctggtgaacatggtgaaaccccatctccactaaaaatacaaaaattagctgggtgtgctggcgggtacctgtaatcccagctactcaagaggctgaggcaggagaattgtttgaacctggaaggcagaggttgcagtgaaccaggattgtgccactgcactccagcctgggtgacagagcaagactctgtctccacacacacacacacacaaaagtgtataactggatcatttgtaacacaaagggtaacaaatgcttgaagggatggataccccattctccatgatatgattattatgcattgcatttctgtatcaatatcaaaacatatacctcataaatatatacatctactatgtacccaaaaaactaaaagtttttttaaaaattaaaaattttttaatagaatgaggttttaagactcagtaaaaagccagctgacctagggatgcagacatacaagtttccttctataagttctaaagtttcaggcttaaaattattctctttcattagctggggtggttacaaatgattatcacatttataaagagaacacagaagcaacagacaataattatgcattaaaatattcgggtcactaaaagagcacaaatactagattaaaatcattgtatactctaggtcggacgcagtagctcacacctgtaatcccagcagtttgggaagccgaggcgagcagatcacctgaggtcagaagtttgagactagcctggccaacatggtgaaatcccgtctctactaaaaaaacaaaaaaatttagtcaggcgtggtggcgggattacagaatcccagctactcggaaggctgaggcaggagaatggcttgaacttgggagacagaggttgcagtgagccaagatcttgccactgcaccctagcctgggcgacagagacgttgactcaaaaaaaatactactactactactaataataataaacaaataattgtatactctttatacccctgccattaaatactgacaatggtttacatatagtaatcatatataataaagctcattttcaggactctggacttaaatacccaacaggtatagagctaatcatagacagactattaccaaagatagtaaacacattaccagtgttggtatctaccaacccaaaaacaaatatgccgacaggcaatcaggaaaaatatgtaaatgtttcataaacatgttaaaacatgtccggccgggcgcggtggctcacgcctgtaatcccagcactttgggaggccaaggcaggcggatcacgaggtcaggagatcgagaccatcccggctaacacagtgaaactccgtctctactaaaaaatagaaaaaattagccaggcgtagtggcaggcgcctgtagtcccagctactcgggaggctgaggcaggagaatagcgtgaacccgggaggygcagcttgcagtgagccgagattgcaccacggcactccagcctgggcaatagagcaagattctgtctcaaaaaaataaaaataaataaataaaattaaaaaaaacatgtccatgtctgtaaggaaaacatgaaataaccagatatttttctaccacatgcactgacaaatgctatagtttgatgttaactgaaatggcaaatatgtggaagaagaggcacactataccgctgaaacacatgtataaaaaaggtatttatatatgtttttcctagtatacaagctttcaaagcagacaaaaacaagacttatacaagacccatctaccaaaaattagctggacctggtggcatgcacctttggttccagcaactcagaaggctgaggcaggaggatcacttgaacccaggagtatgagttggaggctgcagataacaacccaataaccaacgatggcaccactactctcctgcctggatgtcatagtaggacattgtctctaaaaaaaaaaaaaaaaatctgttggccaggtgcagtggctcacacctgtaatcccagcactttgggaggccaaggcgggcagatcacttgaggtcaggagtttaagaccagcctggccaacatggtgaaacctcrtctccactaaaaatacaaaaaaattagccaggtgtggtggcacacgcctgtaatcccagctgctcaggaggctaaggcaggaaaatcgcttgaacctgggaggcagacgctcactgcactccaggcctgggcaacagagtgagactctgtctcaaaaaaaaaaaaccaaaaaaacaaaaaaaaaaacaaaaacaaacaaaaaaaaaaaacaaaacaaaaaaactattagttatactttggagataagaaaggaagtgcagaaggaaaacagaaatttttacttcttactttttaatttctaaatgtttataacatttaaaaatatcttaccgtgtacgcataattttaaaataaaaaattttaaataattaatttgtaaaggttatactgcttttggccttcaatatggggtggaaatagaaaagtagcaagcttagagaactttaaacggaaagtaaaaaaaattttttttactatgcaatgtttatgtaaacattgcataaaaaaaggaaaggaattctttcatatagaaaatagttaagaaaatatactagcgatttaaaactatctccacctaatctgaattcattttgaatgaaaactttttcctgtagtaatgcattaaaacataattaggacaaagcgtaaaagtaatataaactcaaatttaagcacagtattacagagaatattcttattgctagaacattcaaaactgcccctatttttgataaaactgttgaatttggatataataaaagttcattatcatatcttaatattaatggaaatctgaagttatctatagtaaaacaattccagtgagccctcttatggaattatcaactatgacaattactacaaatgttcwatcaaaaggcagatgatcatttctaaggaatatctatctacctgtatacactgtgaggtaacgtgtaagtgacaaattctataaatattcattgtcttgactctaattaaatttcctaagaacagaaacttaatcctttgctacactatatggatgtatacactactgatgaggatgtgatatccaaacacatctcttcctaaataagtcatttactccaataattcagactgggacatttaaaagcttctataactattggtgcattgaaatttctgtcattgcccagagtcacagtgggaaaaaaagaaaattttaaatataaacacacacgcttgtgcacatgaacacacacaaagataccataaacaaagtttatcccaaaaagtgaggggaaagaaattatttgcaacattaacttatttttaacatatagttattataaaccattaataaataaatattccaacacatgttggaatatggccacaaggaactaccaatagtcaataaacatctcaattcagcaataatcatcctttttaatctctgcaacactgaaaaggacttctaacctcaaaattggtatgaagcttgagtaaataagtattttcatatggacgtatatcatataaatcttttctggagggcaatttgccttcaaagaagccctcatctgtaaactctgacacatacattctaggaattctttcctaaggaaatagccagaaatgggcaaaggtgtagttttaaatacagatactacaaccttgtttatattgttgaaaattttgaaaagaggaagagatagatattattaattatagtagaacargacaatgggataataagcagctattaaaaactgatttaaatctacatgtagtaaaaggaaaataattttctgataactgtttaaaagactatcttaaggaacaattttatttttaaagtccttttcttcataaaatatagataaaacacacgtgtttacacaaagacagaaaagagtttggattgtcatataacacaacataatcattccacatgcactgctaggaaatacaattttaagaggaagtgatatttttacttttcacttctctcctgcttcacgtttttctcatgaacatgtataaactttaatatcagaaaaaacgataaagactttgaataaaattgctaaaccacaactgagaagcttttcaggcccatatgactagattaccyttgaaagataatgtttctctaaattaaagataggtaggatggggtaggaattacaggaagcaataaaaatagattagacagcagccatgcaaggatgtaaattataaaagtattattggcaagcattccataaaaaccacatacttctgttttgtgcttgacaaacttatcagtaaccattaggggtaaaatgagtatactatctgaaaaggacaaaacttaggtaagcacttgagttctgtcataaaaccatgtgacctctgggagaagaaaggacaaaggagtcatttaaatgtaggaggatcttcatttttcaaatctctactacaaagggttagacaggtgatctccagagttccttttatactctatcgagcctatggttaagcagaataagaaaacatggaaaacctggtgcagcatatgcaatacattctgttctctttctttagcaataatatcttcagcagtttcagaaagactagtgatgtcaaaccaagactcaaagctggaagagaaaaatgtttaagttaaccatcacataaattcaattatgtcaacatgatacatgatttatcatttacagtaataatctgataatgaaacgtggtattgttgcatcaaatccttaggtgcaatttttaaaatttataatggaagagaacacattccaacaacaaagataaattggttgcatttttgaaccatcaagaactgtgagcttaaagggaacacttttctgatttataaatagattaacaattgtacagtagtataaaaatcaaaaataagattaaggtatatatttataattttacattacaaaagtgagaactatctctgaaaaccaaagccatatgatttttctccatcagtctaagtatggcccactacaataaatattttaaaattcaacatatacataacttgacaataatatacatgcttattccttcccaatgttgaaaatatatatattacaatgagcaattaagtatgagcatgcagattaataatatagaataggtaacattatacccaattctggaaaatgctagtaacatttatgcagtagactagaagttcccaaacttggatcaccagaagcatgttcaaaaaactcagattctcaactcctaccttgacactgtaactcagtatgtctgcacaggacctggaattcttgtctttcaataaaagcgcccagmgtcacaataaggtagcctgccttgagccaccmttcggtaaccagatttgaaataaattcccaaaatttaaaattatttttccacacccaattagcttacttccttcactgatgccaaaacaagtataaattattttttgcccaagttatatttccgttgtaatcagttttaaattatgtcaacattacctcctcctccattctgaagctactaattactttctgaaaactacttttatgtctgattttattatataagctaagattcaaacagtttccagaattaaaacactgtgtttacattgggagaccttggttttaactttggctctggtgctaactaactagtcttatcttgtaacaactttacacctaggttttcttttatgtgagataggaaataatttaacaactctattgtccctggttgtttaatgaggatatagtaagaaaaatccatcttaaaatgttttacaaaggtaacacataaaagaaccttattataaaaatattatcttaaagttgcattcagcagtcttcctttaatcaatgcaagtaagttttaaataatcttttcttaatctgctctcacataatttgtggcaggagtagaacatacaatatacaccacaaagaacttgccaaatatttggcattttaattcagtcactgaaaagaaagtaattttaactaacagcacagatttttgaggttaaatcattaaataactggcttacccaccttttcaagtcatcaaatacatctggcaacaaaaagtttagcaatgaccaaagttctgataaattgttttgcaagggagtaccagtcaaaagaagtttgttatcagcattgaatcgttttaactccctgattagacggcacttcatattcttaatcctgtgtccttcatctactattaagtatttccaatagcaatgctagaaaacgaattgaggaaaaagatttttaaacaatgatctcacaatttttctaacaagaattctaaaaataaaacctctattatgagggatggatgttgaattttatcaaatgtaatttcagtaactactgaaatgatcatgttttcatttgatccacttacaaggattcctaaaactgatagatatttctgttcctggaagagacctactaaaatatgcaataaagtttgaactccacctattttgaatttaagatttccctattcacaccttagtcaacgcagttgtagctttcttttctaatattttcccaagttttgatattaatgttacactagactactaaaaattgagcttttattagttccatatgtgctgaaacatcaaatagcactagaattttcccttatttaagcaatttatattttcacagaaagtcacccactcactttcataaagttatcaaggaaattgttttaactttctcattttaatatctgtgatttctcatatatcttaatcaggaaaatttataattaatctaatttatattaacatacagaaatatgaagtatttctggaaatataaataacaatctgaaaaatataactatccttaaaaaatgggactgacaaattgaggaaagagtatagagaacgttttgcattttgctttatacatcccaaaagaatgaaaaaagtttatagtactgtatcttctttattaaaataaccaagaaaggatttattttcctggcaatatgttaaaccaaaaaacctgaattatctctcactgtaagacagctatctaaaaatccagataaaaatataaaatatccttggccgggcgcagtggctcaggcctgtaatcccagcactttgggaggccgaggcagacgcattacctgaggtcaggagtttgagaccagcctggccaacttggtgaaaccccgtctctactaaaaatacaaaaattagctggacgtagtggcacatgcctgtaatcccagctactcaggaggcgaggcaggagaattgcttgagcccgggagacaggttgcagtaagccgagatcgtgccactgcactccagcctgggtgacagagtgagactgtctcaaaaaaaaaaaaaaaaaaatgtgtgtgtgtgtgtgtgtgtgtatatatatatatatatatatatatatatatatatatatatatatacttttataatgggtatgtgagagaaaagaaaacaaggaaataaatgatgaggaatctgaaagccaaattagcaagtgaactcagtcacttccactcgcactcagcaacaaaagccctggaacctcacactccgttaccagagtaagctaagatccttgaaatgataatataagctcacttaaatggaaaaagtcaaaagtttctagccactggcaaaggaaatggacaaggaagcttaactatttcattacaggaagggtcttcatgttatactactgagtagaaaacacaagttgcaaaagtgaatgcaggctggaagtggtggctcacacctgtactcccagcactttgggaggcctagacagttggatggcttgagacaccctgttcctacaaaaaaatacaagaatcagtcaggtgtgatgacggacgcctgtagtcccggctactcaggagacagaggtaggagaatcacttgagcccaggagattcaggctacagtgagctgagatcgtgccacaggactccagcctgggtgacaaagtgagaccctgtctcggaccaaaaaaaaaaaaattgaatgtatagtatgatcatatgtgtaaattatacctacatgttagctataattatttagtataaaagtagtagttctctgggaggctgaggcgggcggatcacgagggcaggagatcgagaccatcctggctaacacagagaaaccccatctctactagaaatacaaaaaaattagccgggcatggttgtgggcacctgtagtcccaactactcggcaggctgaggcaggagaatggtgtgaacctgggaggtggagcttgcagtgagctaagatcgcgccactgaactccagcctgggcaacagagcaagactctgcctcaaaaaaaaaaaaaaaaaagaaaaaagtagtagttctcaggtagaattacaggtgcttttacatcttcctgtacactaccctttaaaaaaaattggtatatattacttttactgtaaagaaatgctttaaatcaggggtccccaacccccaggtcacagacctgtaggggtccatggcatgttaggaaccaggccacacagcaggaggtaagcagctgtgagcgagggaagcctcgtctgtatttacagaaaagggaagcttcatctgtatttacagccactccccactgctcacattatggcctgagctctgcctcccgtcagatcaggagacattatattctcataggagcatgaacactattgtgaactgcacatccaagggatctgggttgtctgggttgtgcgctccttataaaaatctaatggtggatgatttgtcactgtctcccatcatccctagatggaaaacaagctcagggctaccactgattctacgttatgttgagttgtaaaattattattattttgagacacagtctcacttggttgcccagccaaccaagcggcatgatctcggctcactgcaacatccgcctcccgggttcaagcaattatcctgcctcagcctcccaaggagctaggccactatgcccaggtaatttttgtatttttgtagagatgtggtttcaccatgttggccaccatcttggccaggatggtctcaaactcctcacctcaagtgatctgcccgcctaagcttcccaaagtgctgggattacaggggtgagccactacggccagccctattatttcattatatatgacaattttataataataaaaataaagtgcacaataattataatgcatttgaatcattctgaaaccatcccccacccatggtccatggaaaacttgtcttccacaaaaccggttcctggtgccaaaaggttggggactactggtttaaatttttttttctttttgagacagactctcactgtagcacaggctagagtgcagtggcgcaatcacagctcactgcaacctccacctcctgggtttaagcaatccttgtgccattaaacatgtgcaccatcacacccagctaatttttgtatttttttttttttttttttttttttgagacggagtctcgctctgtcggcccaggccggactgcggactgcagtggcgcaatctcggctcactgcaagctccgcttcccgggttcacgccattctcctgcctcagcctcccgagtagctgggactacaggcgcccgccaccgcgcccggctaatttttttgtaatttttagtagagacggggtttcaccttgttagccaggatggtctcgatatcctgacctcatgatccacccgcctcggcctcccaaagtgctgggattacaggcgtgagccaccgcgtccggcctaatttttgtatttttagtggagacagggtttcgtcatgttggccaggctggtctggaactcctggcctcaagggatctgcccacctcagactcccaagtgctggaattactggcataagccttcatgcccggcctggtttaaatactttttaatgctgtacacattcataaactttgctaaactcctgaactgagatttctgcaaatcatattccaaagttttaccagcagacacataaaacctgacaatactggtcataattatgcaagtcataattattctatttatgacttatgtgttttgattttatgttgaaaccattaaatactttcctatttccaagcaagcaagataaacctaaggggactgcactaagagggttctcacatggccagagaaaggaaaaaaaaagcagtcaagaattataaatgaatgaggtagagcagtgaggaagaagttcaaaacaccaataaatgaaaacagaaggcatgaaagaaaaaaggtcaatctttcaattctgttatgctaactggaaattatttaaataagtagctagaacatcaagaaaatagaaacgaaaatgctaccaaatagtccaataagatactctaaaaataacttgtcttcaaatactcttatttgattaaaatacgataagtaaattccatatattcaaagtacctgtcacaaatatatctgtaatacattccgagattaggtctatttctggatgattctaagccataggttaaactgccataagctttaattatattgttacaaatgatggccttcatcccaatcattctgttaataaaagtttccagcttctacaggtatatgcacaatataatctattatttcgacaacaaaaaaaaattagacaaatgctcccagatggtgagaaagtgatataaatgaagaaaagcatgttttatgtattacaaagaaaccaatgaagatcatttgtacctgtaacgcatttcggtctctcatggctatttcaaatgacgtgattaccacaggatgaatctgcaaagtccctttccgtttgtaaatatttcttaccaatttttgacgttcctcctgggttccatgatataacattgtagggatctgaaaaattttatattgatttttatcagacttaagaacaaaatgtaaatattgactatttagaaaatataaatcattctgagggaaaaaatataattttaaaaaattttatttctatttttctatagcaaaataagccaagcaattctaacaaatcattgaactattatgggagaaaatgaaaaaaaaacaaacaaaaaaacaaagtcaggcccagcacaatggctcacacctataatctcaacactttgggaagccaaggcaagccgatctctaaagtccagtagttcgagatcaacctgagcaacatggagaaatcccatctctacaaaaaatacaaaaattagctggtgtggtggtacgcacccgtagtgccagctactcacccagtggagtgagatgggaggttcacatgagctactcaggcgtgtgagatagcaggctcacatgagcctgggaggtgaaggccacagtgagccagaatgacgccactgcactccagcctgagcaacagagcaacatcctgtctgaagacaaaaaaaaaggcataaaaacaaatagacgggccaggtgggatggctcatacctgtaatccccagcactttgggaagctgaggcgggcagaccacctgaggtcgggagttccagaccagcctgaccaacatggagaaaccccgtcactactaaaaatacaaaattagccaggcgtggtggcgcacgcccgtaatcccagctacctgggaggctgagacaggagaatcgcttgaacccgggaggcggaggttgcactgagccgagatcgtgccattgcactccagcctgggcaacaacagtgaaactctgtcatacacacacacacacacacacacacacacacacacacacacacaaacacaaccccccccaacaaaaaacctacaaatacataaaacacatataggctgggcgcagtggctcacacctgtaatcccaccactgtgggaggccaaggtgggcggatcacaaggtcaggagatagaggccatcttggccaacatggtgaaatcctgtctctaccaaaatacaaaaaattagcctggccttgtggtgtgcgcctgtagtcccagctactacactccagcatggtgacagagacagactccatttcaaaataaataaataaataatatatatataaatatataaaatgagacagatggtgatactacgtctagaatatatatatttctcataaggcaaaaatgtgcagaagggctgggcccggggggtacagtggctcacgtctataatcccagtactttgagaggccaaagtgggcagatctcttcaggccaggagttcaagaccagcctggccaacatggcaagacatcgtctctactaaaaacataaaattagctgggcatggtggcacatgcttgtaatcccagctactccggtggctcaggcacaagaattgcttcatcatgggaggcagagattgcagtgaaccaagactgcatcactgccctccagcctgggyaacagagactccatttcaaaaaaaaaaaaaaaaaaaaaaattgcagaaggtaacaagtacagaaaaaacagaaaactctcttcttagccttttggcaaagatcaagtgaagaacaagcagaatttttaataaaatctctacctaagtctgtctcagtcgaatcaaattaccaatgcactgaaaatcattcaggaatattttaggaaagatgtcagggatttccaaaacctatactatataaatttaaattagggtattgtgcagattgagtaagtcaaatcagacaaaatatttatacagaaaccaatataattatargagttctacaatttaattcctactacaacaaagcataagaaaacatgtaaaattataattttaacataaggaagcatgtcttacatctggtgtaaatcttttgaattcagccatccagttaggaagtgtagacaaagggccacagacaagaaaaggtcctggtactcctctctgaatcatcaatgcaatagtagcaatgcactgaactgtcttacccaatcccatttcatctgctaaaatgccattaattccattttcccaaagcatctggacaaaataatagatactgtatttaaacttggatataaacaactacaggattacaatattttatttcttctctttaaaaaatcacacccaaagatgagaattatgttaaagctgatatattcacaccataaattataacaacactggaaagtcctttatcaaagccataaaagtgctggaagccattaacaaggtaatttctacttctaaaaattcagggtaaagaaatcagaaagcaagtatccacatacaaatgtataatagtgaaacatgatagaaatgactcaagttgtggtacctcaaatcattaggctactatagaaataaaaccagtatcttgtattaaaaattccaattcattaccctaagccattccatgccttctacttggtaccatcgcatcactcctccagtgaagtgctttggttgttgaaaaggtactggctgaccattacacttccggactgggtcaaaaaagaatttagtattctgcctaaccgtttcagacaatctatctttaattatactattcgaatctttatttttctgaagatcttccacacagagattagtagaggaggagttttcatcctgtagagaaaaaaagtttaataagatgtgttatacaaaatgctgctgtatgccaccatttatcagaaaatgcaactaacaaaatctactgagtcctataatcattaagtatagaagactaagatcacacctggattaaaaaactggagacatcgccatccctctacaaatgaaaagctactaaaaaaaaaaataacaggctgccacagtggctaatcctacaatcacagcactttgggaagctgaggcaggaggatcacctgagtccaggtatccaagacaaccctggacaacatggcgaaaccctgtgtctactaaaaatacaaaaaattagctgggtgtggttgcacgcaactgcctgtatcccagctactcgggaggctgaggatcacttaaacccaggaagtcaaggctgcagtgagccatgaacacagccactgcactccagcctgggtgacagaagactccatctcaaaaaataaaataaaataaaataaaataaaatataaaaatctgagaataacccttacaaattaaaatcaggcacatacttttgaaaagatcattagaattgtatctctcttccaaacttctaatattgtgatactcaataatttattaaactgttacacagaaaatacagtacgcataaataagacgggcaaaagatattaacagatactttacaaaagaaaacatacaggccgggcatggtggctcacgcctgtaatcccagcattttgggaggccaaggcaggcagatcatgaggtcaagtgatcaaaaccatcctggccaaaatggtgacacactgtctctactaaaaatacaaaaattagctgaacatggtggcatgagcctgttgtcccagctacttgggaggctgaggcaggagaatcgcttgaacctgggaggcagagtttacagtgagccgagatcgtgccattgcactccagcctgggcgacagagtgacactccatctcaaaaaagaaaaaaaaagaaagaaaacatagttatcaaagaacataaaaatatactctacttcagtagtaattaggaaaatgcaagttaaaaaccacacaagttaccatttctcatctaataaaatggctgaaattaaaaagactatcaaatgctgacaataatgtaagctggagttttcaaacattgctggcgagagaataaaatgatgtgtttactttgggggggaaaatctgtactttcttatgaacacacatttgccacgtaacacaacaataccattcccaggtacacaggcagaaagtatgaaaacatgtctacacatggacttgtgtgcaaattatcatagcaaccttactcataaaagtcacaaactgcaaacaacccaaatgcccatcaataaggggatggatgagaaaattgtaacattcattcaacagaatactagtcaataagaagaaaccrgttactaatatgctcaacaacataaatgagtatcacagacatgttgagtggaaaggaaataataagccatcctataaaaggtgtaaaaagtggcctcctctgggtttgggggtggaaagacatagaagagatccctttacaatggaaatgttctataccttgatttggatggtggttacacaagtgtatgcaagtgtcgaaattcattaaaataccatacttaacaactatttcttactgactgactgtaagttataaaatgaagccaaaatcccatagtaaattacagaagattacatctagactttatcttaaaaatccaactaaatgtttatctaactaaatctttaaaaatccaactaaactgcacccataaaccagtccttaataacttaacaaagaataaaaaccaagacacttttacaatataaattttggacaaaattatatgaccaaatagattatctctcattttataaacataacattaatttcccaaaggcctaaaaatctttaatatgtaaattaactacctgaagttcatatccattcatgaatattttcatgtcatgattattttgcttccctaggcaaccttgtaattttaagtacttgaacaataaaaagtcagataacaaggaacctctctacatgaaatgggctaagtgaagaggtggctcggaaatcaagccttctcaaacagaacttttaagaaacttaaaaaatctttaaggtctgaagcaagattaaggcatccctcacagcttccataagatgattcacggtttatatccacatggttacgagcacttgtatcactgccagattcacaagttaaaagcaacattgctagacccataaattaacatttatacatcaagaatcatgcaataaaacaactaactaaagttgatacataaaaaagaagaatgttggatatggaagaagtgaatacataggtatttttttttaaagcaaagaaacaggataatagtgagaagaacgtatactgctgattaaagaaaaaggactagtaactgaggagtaaatatgacttctaaacttaatcttacattataaatttcttacctcattctcctttttattttttttagccacagacaaaatttcctagtagtttgagaaaacaaaaacaaattaataatgtatgaagttcatttatttatttattcaacaagcatttattctgtgctcattttgccaggaaatgaggatgagattctcaagataaaactagtagccttcaggcagaaataagcctatagacattactggctcataatatttcataacattctaggctaatttgggaacacttatacaatgggatatttcatcaaatacagtgattttccagcttttctttcttttaatctgagtagattaagtacaaattcacacatggcaacaaacctctagtcctggggtcagcaaactacagcctgtagaccaactccagctaagcgaatacacaggtatttttttaaaagcaaagaaatgggataaattggaacaaagtcagcctcacttgtttacggtttgtctatggctgctttcaagcaacaacagcagagtacagggttgagtagttgcccacaaaactactcaaaagctaaaaatatttactatctggctatttacagaaaaagtttgccaaaccatgttacagcccactttaggcctctgtggatagacatctgagtttgcattcctgggtaagaggcaaagacagaaaaaattaaaaatacagaataaagtgctctgattttgaagtacctactagatgctgctggtagggagacaaacaatacccgagtatgtcactggatgacttagcaaataattatcttacataaaattatctaaaaagttgtcaccaggcttcatcattcaagatagtgagggtagatttcaagcagagagaatatagaaggcataggggatgaagtagattcaaaacagcaatatcaaatttaagattcatagaagagtaacaggacatgtaagtggctgacacacacacatatatatacatgggaatatatgtatatcgtgtgtgtatgaagtattatgtatgtatagatattcatattataaggctgaggctaaaaggattttataccaggaactgataaaagctgtcctgtaaaatgactagataaaatgaaacttttgaaagaacaatttggaaataaatcaaaatctataaataccaccaatgaagtattcttattaaaaatcaagcatgggcaacatggtgagatcccatctctacaaaaaatataaatgttggctgggcttggtggtacacgcctgtagtcccagctactcaggaggatgaggtgggaggattgcttgagcccagcaatcagaggttcaatgagccgagatggcaccactgcactccaccctgggcaacagagaaagatcttgtctcccaaaaaaaaataaaaataaaaaaaaaaataaaaaaacaccttaatcacaaacttccgtatttaacttatagttactatagttaacaggaaacacaagaggcagagaaatcatggggatacaatcagtaaagtctagaatgtggggaattatacagaattactcattttcttcaacaaataatgtttcttaaaaaagatgagagacactctagatctaaaagagacccaagatacgcattaatcaaacacaatttatgtaacttttttggatcctgatttgaaccaactatttttttaaaatgtatgagctaagcagatcacagcggtaagtgcctatagtccctgcactactactcgggacactgaggcaggaggatcatgtgagcccaggtgtttgaggtgtagtcactatgacaatactcaggaatagccactgcactccagtctcgtcaatacagcaagcccccatccctaaaaataaaaattagcctattgagaaatttaaatattaaggaattcccatcgactttcaaaagtgtggtaactgtattgtggttatggttctaaaaaatagtcttggccgggcatggtggctcaagcctgtaatcccagcactttgggaggccaagtcaggcaaatcacaaggtcaggagtttgagaccagcctggccaacatggtgaaaccctgtctctactaaaaatacaaaaaattagctgggcgtggtggtgggcacttgtaatcccagctacttgggaggctgagacaggagactcacttgaacccaagaggcaaaggttgtagtgagccgagatcatgccactgcactccagcccaggtgacagtgcgagactccaccttaagaaaaaaaaaaagtcttgctgagctttttgttaaaatatcccagaattaaaaagcgattggctgggcgtggtggcttatgcctctaatcccagcactttgggaggccgaggcgggcgggtcacctgaggtcaggagttcaagaccagcctgaccaacatggagaaaccccatctctgataaaactaaaaattagccgagcatgatggcacatgcctgtaatcccagctactcgggaggatgaggcaggagaatcgcttgaacctgagaggcggatgttgctgtgagccaagatcatgccactgcactccagcctgggcaacaagagtgaaactctatctcaaaaaaaaaaaaagtgataaaggtggacattcaatttactatcctctaaacatttgtaatttttgagattttccgtaatacaaagaaaaagaacatacatataccaaaatgttagtgattatctgtgtgacagcttttcaggtgatttccttgtattttgtttattctcaaatttttctacaagaaaatgcaattccttgtgaaaccataaaaagtaatggaggttatgagtaattatatttgagtttcagaaaaaccaatctggtactcttgacaatgagagctagactaggattataaaaatcaattaagaaactactataaatagggcacagtaagggcataaacaccagagtagcagcaaatgaaatgactcacagaaatcgataaaaatctagatatataaggaaattcagataacctcctaaattgttttagatgacayagtagatactggttctgatattaacaccaaaaaaagagaaaacaaaagagcaagattcggaagagaggaaaagataaattgtttgctttgtgctaggtatcaatttcaaagataccaataaattcaactggtaggcgtaaaactgctcaactgcataatgtgtaaggaaatatgcacaggctactctttaaaaaaaaaaaaaaaagggccaggcgcggtggctcacgcctgtaatcccagccctttgggaggccaaggcagatggatcacaaggtcaagagatctagaccatccaggccaaaatggtgaaactccatctctactaaaaatacaaaaattagctgggcgtggtgacgtgtgcctgtagtcccagctactcaggatgctgaggcaggagaatcacttgaacccgggaggcggaggttgcagtgagtcaagatcgcagcactgcattccagcctggcgacagagcgagactctctctmcaaaaaaaaaaaaaamaaaaaaccagggtttcattctcttgcccatgctgcagtgcagtggcgcaatctcacctcactgcagccttcacctccccaggctcaggtgatcctctcacctcagcctcctgtgtagctgggaccaaagtcatgcrccaccacacctggctatttctgtatttctttttgtasagacaggatttcgccatgttgcccaaactagtcttaaactcctgggcttaagtgatcctctcaccctggcctcccaaagtgctgggataacaggtgtcaggcatcatgtccagtccagcctactcttaaaaagcttggaaataggccggtgcagtggctcatgcctgtaatctcagcactttgggggccaaggtgggtggatcacctgagatcgggagttcgagaycagcctgaccaacatggagaaaccccgtctctactaaaaatacaaaatttgccaggcgtggtggcacatgcctgtaatcctagctactcggaaggctgaggcaggagaatcgcttgaacctgggagccggaggttgcaatgagccgagatggcgccattgcactccagcctgggcaacaagagcaaaactgtgtctcaaaaaaaaccttggaaataaagaataaaaaacagggcaatctagaaagactggatcaaaaatttttgttctgcagacaggaaaacacaatgtatctataattgaaaggcaaagacccagtgaggaaggaaaaggtgaagaaacagaagggataacttggaggagcagggtccacagtggcagaacactcaattgggttatacccctccaaatgcattcacagatttagagattcttcagcaagtaaggtgagaatgaaacaatggaaagaatttagttaggcgaagaggaaaagagagcaggaaattcagtaaatatacagaagaaagaagtaacagtaaatgaaagaataactggtatgggrccaggcatggtggctcacacctgtaatcccagcactttggaaggcagaggcaagcagatcacttcgggtcaggagtttgagaccagcctggccaagatggtgaaaccacctctctatgaaaaaatacaaaaacagccaggcgtggtggcacgtgcctgtagtcccaggcgctggactactcagggagctgaggtgaaagaattgcttgaactgggagacggaggttgcagtgagccgagatcrccactgcactccagcctgggccacacagtgaaactctgtcttaaaaaaaaaaaaagaaaagaaaaagaaagaaagaaaaactactatgcccacagatctctgaataaactagccaagtgatttaccaaaatggaaatttgcttaaaatctttcaatagcttcctactttacttatggcagccttaaactcctgaccatgcttacatcgacagcttcatccttccttcatcactcttttcacttatatacaaattggaggcaaatataatttacttcaagttttttgaaactgccagtctctcttgaccctggatatttgttcaatgctattatttcttcctaaaacacctcccccactatcttacctgtactttactctttccctattaatcccacctttaaataatttaacttttatccttcaagtcacaacacagatatcatttccttttcatagatgaaaaggttcaggaactgcatgccagagtgaagagcccctctaatatggtgtataaacatccaattcccaaccggacacagtggctcagacctgtaatcccagtactctgggaggccgaggcaggagcccaaaaattcgaggccagcctagacaacatgacaaaaccccatctctacaaaaaatacaaaaatcagccaggcctggtggcacaggcatgtagtccctgctactggggagtgtgagatacgaggatcacttgagtctgggaggttgaggctgcagtgagctgagattgtgccagctgcattcgagccagggtaatagaaacaytgtctcaaaaaaaaaaaaattcaatttcattgactacttactcctatatctctctctgtatgcaggctaaggtgaagacagcatttacctttctttactaatggatttcatccacctatgacaaagtttgcccaaaaccratattccacaaccatttaacaaattaaataaacagctgtatgactggctaaacttcagtatggcatattaaaagtggtttttcttttttragatggaatttcactcttgttgcccaggctggagtgcaatggtgccatctcagctcactgcaacctccgcctccggggttcaagcaattctcctgcctcagcctgcccaagtagctggaattacaggcatgtgccaccaagcccagctaattttgtatttttagtagagatggggtttctccatgctggtcaggctggcctcgaactcttgacatcaggtgatcctcccaccttggcctcccaaagcgccggggtttacaggtatgagccaccacgcccagcctaaaagtgttttaaactgcaagttgaatagataccataatgaatttcagtggaccctaactttgttttttttgagacagagtcttgctctgctgcccaggctggagtgcagtggcatcatctcagctcactgcaacctctgcctcccaggttcgtgattctcctgcctcagcctcctgagtagctaggactacaggcgcaagccaccattcccagctaatttttatatttttagtagagacggggtttcaccatgttggccagacaggtttcgaactcctggcctcacgggatccacccgcctcagcctcccaaaatgctgggattacaggcgtgagccactgctcccggccccctgacgattatttttcagtgaaaaactatcattgcatccctagagaaaaggaaaactattatgtaaatttttcttctgaagagctagagtttgaacttcaggtaaaagaacaacagtagacaatagagttgtgcttttttttttaaatataagaatgtggccaggagtggtgcctcatgcctgtaatcgcagcactttgggagataaaggcgtgaggatcacctgaggtcagtagttcaagaccatcctggccaacatggcaaaaccctgtctctactaaaaatacaaataggtacctgtaatcccagcttctcagaagctgagacataagaatcgcttgaatatgggaggtggagcttgtagcagtgagccgagatcgcgccactgcactccagcctgagggacagagcaagactgtctccaagaaaaaaaaaggaagaatgtgacacattaaaaacatgctaaggaactggtttgtcagaactgaagatgctctaattcattcatatttttaagtaaaaagtgagaaatgaaaaaaagaagctggttttagaaaagagcatatgatttcagtttcgtaaaagtcttcaacaaaaaacaagaataaagttcttaagacaaggttaggggttacaaaaagttaaattatagtgacaatytctgactaggccaggctcagactcgtttaacaaagagctggtaccatctttttccctgaaatacttatctgctctggtcagacagtgtctttactaccctaccctttccccccaactctccgcaacatatatgtaattttaagctctatgcccatgcctgttgtttccacagttccttgcaaaatgctatacaagtccactaggtacttaacaagcacaagataataggtagagtcaaagctattactgttatctgtaataacccaaataagaaaaccagcaaaggccgggtgcagtggctcacgcctgtaatcccagcacttttggaggccaaggcgggtggatcccctgaggtcaggagttcaagatcagcctgggcaacacactgaaaccccatctccactaaaaatacaaaattagccgggtgtggtggcacatgcctgtaatcccagctactcaggaggctgaggcaggagaattgcttgaacctgggaagcggaggatgcggtaagcctagatcgcaccattgcattccagcctgggcagcaagggtaaatctccgtctcatcaaaaaaaaaaaaaaaagaaaagaaaaccaacaaaaagctgggcacactggctcacacttgtactctcagcagtttgggaggctgaagcaaaaagatcatttgaacccaggagttcaagagcagcctaggcaacatatgacatctcattgctacaaaaaatttaaaaattagccagctgtgcatggtgtcacacacctgtagtcccagctactcagggggctgaggtaggaggatcacttgagcccatgaggtcgaggctgcagtgagccatgattgtgccactgcactccagcttgagtcacagagtgataccctgcctcaaaaaaagaaaagaagaaaaaaaagaaggaagctagaaaggaaggaaacgaaagaaagaaaagaaaaccagaacaacctaaaggtgtaagcctatttgccacttaagtgaggatgggcgcaatggctcacgcctgtaatgtggcattttaggagaccgaggcgggcggatcaccttaagtcaggagttcaagaccagcctggccaacatggtgaaaccccatctctactgaaaatacaaaaattggccaggcgtggtggttggcacctgttatcccagctacttgggaggctgagacaggagaatcgcttgaacccgcgaggtggaggttgcagtgagcagatatagtgacactgcaaggcagcatggaccacagagctccatctcaaaaaaaaaaaaaagtctatgaaggtcagatgacattagtttcagattagtctcaagtctactgtaggttggtagatagcttcaaacattttggcagcttcacctataaatgatatataatattaaattcaaaacatatttcatgtgatattgaatattcaatctttacagatttaaggtggtttaaaacctacattttactcaacatcaaatgttaggtgccctctcccttttatttttacctcttttgacatgacctctgaaatattgtatgattcatcttctcttcctctttttttcctcataactataaaaaaaaattttatttttgatagcaattaaaatagaaatataaacgcatattcttcaaaactagaataaggatatttacctggcttctcttcacttgcatcaattgaatttttaccctacaaaacaaggattcagaatattgattttattaaggaccttyatagtattatacgttaaaaggcactgattaacttgagaaaaaatatgtttcctgcaattgagccacatccacaatttttcactattatacttacctacatgtaatatttttctgtatttccctactataacttgttcataatctctgctttttcccaagggctctacttctgtccatttttttccatttagaagagaaatttcaaaattaaacatagttggcatttcgtttgtttgttttttggagacggagtttcactcttgtcgcccaggatagtgtgcactggtacaatctcggctcattgcaacctccgcctgccaggttcaagagattcccctgcttcagcctccagagtagtggggattacaggcacctgccaccacgcccggctaatttttgtatttttagtagagatggggtttcaccacgttggccagctagtcttgaatttctgacctcaggtgatccgcccgcctaggcctccccaagtgctgggattacaggcgttgagccactgcacccagcccatagttggcatttttatttagaaataccatgtacatcttggccgggcgcggtggctcaagcctgtaatcccagcactttgggaggcagaggcgggcagatcatgaggtcaggagatcacgaccatcctggctaacatggtgaaaccctgtctctactaaaaatacaaaaataggtatttttgtagggtagggtattgaaggaatacccttcaataggtagggtattgaaggaatattcattgtgaatgaaattcatacattaaatataacccaaagcagaaataaaagagaatactaatggaaaattattagtgaggaaggtaagagaaatgagatgttaagaaacagtttctggccaggtgcagtggctcacacctataatcccagcactttaggaggactaggtagtaggattgcttgaagccaggagtacaagaccagcttgggcaacaaagcaagatccccacctctataaaaaatgcgaaaattagctgagcatggtggtgtgcacctgtagtctcagctactcaggaggctgaggtgggaagatggcttgaccccaggagttcaaagctgtagtgagctactatggtgctactggactctagcctgggctactgagacatcacctctaaaaaaattttttaagtttcaaaatagttgacgcccttatgaaaaaagcagaggggaaaaaaatcaaaaccctggtataaaaagttaggtggaataaagtgaaggatatattaaattaacaggttaaagagcagggaataaatgactaagccagtaaaattgtcatataaataaaaacatgttcttcaaaacccctaggtaaggccagttgtgctagctcatgcctgtaatcccagcactttcagaggccaaggtatgggtgtgggtgtgggggatagcttaagccaaggggttcgagaccagcctgggcaacatagtgaagctctgtctctatgaaaataaaaatctgaaaagccctaggtaagtctctgaaattagcaagtgagtcaaggatcagagggttttttttttgtttttttgtttttttttttgagacagagtcttgctctgtcacccaggctggagtccagtagcatgatctcagctcactgcaacctcggcctcctaggttcaagcaattctcctgtgtcagcctcccgagtagctgggattacaggtacccgccatcatgcctggctaatttttgtatttttagtagagactgggtttcaccatgttggccaggttggtctccagctcttgacctcagatgatcggcccaccttggcctcccaaagtgctgggattgcaggcgtgagccaccgtgcctggcccatttttattttttaatactctctctctcagtgactcagtattaccagttttatgtatttatttatttatttatttaggaacagagtctccctctgtggcccagactagagtgcggtgatgcaatcttggcccactgcaacctctgcctaccgtggttcaagtaatactcgtgcctcaacctcccaagcagctgggactacaggcacacaccaccacgcccagctaattttttgtatttttagcagagacagggtctcatcatgttgaccaggctggtctcgaactccttgcctcaaggaatccatctgcctcagcctcccaaagtgttgggattataggcgtgagccaccacacctagcagtattaccagttttaaataatgggttttgttgcaaaacagtctgcaaaatactttatcaggcattttaacatcaccattaactagtctaagaatcaaataactggacttaatctcagcactttgggtggccaaggcaagtggatcacaagatcaggagttcaagaccagcctggccaagatggtgaaaccctgtctcttctaaaaatacaaaaattagccgggtgtgctggcaggtgcttgtaatcccagctacttgggaggctgaggcagagaattgcttcaacccaggagacagaggttgcagtgagccgaaatcacgccactgcatcccagcctgggtgacagaacgagactccgtctcaaaaaaaaaataaataaataaaaggcagkttagcacagaagctaagtagaagctcttaaactaatcctgggttcaaatccgtaattttcagcaaattagagtcagctctcattatctgcagtacttgtggttcgataaaatcactatgactattgacttattgcccctaggaaaaatacaagcttgggtctctgactctggttatgacattttcaaccaaacgatacacaaccctgttttatttgtgtttctgtttttaaagrtatcttatttaatatatatgttgattaatattgaactcagggccagctgggtgcagtggctctcgcctgtaatcctagcactttgggaggctgaggcgggtggatcatgaggtcaggaattcgaaaccagcccacccaatatggtgaaaccctgtctctactaaaaatacaaaaattagccaggcatggtggcgcgcacctgtagtcccagctactcgggaggctgaggcagaagaattgcttgaacccaggaggtggaggtagcagtgagctaagattgcaccactgcactccagcctgggcgacagagcaagactctgtctcaaaaaaataaaataaaataaaataaaataaataaataaatatcgaactcagggccaacagcactgtacctcatgcctcaatgaagcttacccaagacatactttctccatatggcacagcctttttgtacttagaaacactagacagcactttggtacaatagttgggggccattttaacagcaaaatcaccatgaaaaagcacaaaaaaacgcaaaagttatggtgctaaataaagaccatgaaaaggatatatgcttgacatacatatggtagcagaaaacaaagaacagcaacccatgtttgagctgagcttggaacatatgtattggaggactaaaattctttgctgctctgaacataagcatatccaaaaatgaccatgacggtgtcaggaatcttgactctggggttacaaataaatgtaagtgagtaggcgaattcacaaatatagaatccttgaatatgattgttctttatctccttgcatcagcctatttatgtaaaatgggggaaaaaagtacctctacctaaaaagaactgttgtgagagtaagggaaaacaggctgggcgtggtggctcatgcctgtaatctgagcactttgggaggccgaggtgggcagatcacaaggtcaggagatggagaccatcgtggctaacacagtaaaactctgtctctactgaaaatacaaaaaattagccaggcatggtggcgggcgcctgtagtcccagctactcgggaggctgagacaggagaatggcgtgaacccgggaggcagagcttgcagtgagccgagattgcgccactgcactccagcctgggtgacagagcgagtccccgtctcaaaaaakaaaaaaaaaatagagtaagagaagacatgatagcacacctgacmcacagtatgtattcaataaattatttctcttttcactagcaaaacttcattacaggtttcaaagaaggtggccacttacaaaatgccttgaagtttaaatttgcagattctttccaattaagaaagtcaaattttgccaacgtccaaaataatccatagaataagaaactaaagtggaccatactttggctctttctccatttcttaaatagtgaggaacagattttacatgtttctgcattgcttgtaacaaagttaggtttatcactaaagaaacttaaaattaaacagatgatcaaaaaagtcagaagaatacaaaagtatttcttcaatatttaaatgacataaaaaatattccggctggctatattacctttttaacttttaaagactccttttttctctccaatttttctttcttcttctgttcctgtaagacaattttttcttatgtcacaagtggaaagtgcaacatttaaaaaaaaaacgcatatcaattctcaaataacttatgtttacaatgagaaactaaggtctatcataattaaaaaccagggaggaacttgtacttcaagcctttatggactaatgggacagatttagcctcctgccttaaacaactaaaatccagataaaatttattaaacaatggttttcagacaacatgcagtaacggactgtaaacactgacaaaacggaaacaaggttaatcttctgactgcccagcttactgcctgatacaattttaaagtacaaataatggagaaaaatccaaacagagcccaacagtctctttgtgttgaggagacagaatccaaaacttaagagcagtagcattcccagggtcaagtaccagagaggacaaagctgcacaaaggcagctgttatctctctctcaggctgagtactggtaagtgcatggtaaccaaggccaggagaagagtcaccagaaagaagcaggtggaacctctcatgttccaaggggtcaggcataataaggtatacctcacattctctcagccaaagtagaaagtcctcttaatataaagggcatcaagtagagtgctcagaaaagggatcaacttattcctagactaaaagctattctagacatactcttacaaattttttaaagacaccaaaaattcaaaccatttccaagaggtgatgaaaggggtagatgctgtgtaactcattaagttgaatatttgtttttccatttgttttactttaccataaaaaagtaataaaagggtttcaaacaaaggaaaaaggagatttgacaaatacagcaaaatttaaattgataatttttaaatgtgggtgatggggacaccgggacttactgtattctctcaatttgcacaagtttttaaatcttcataacagtctagtggaaagacaaacaataaatacaataaatgatgtatatcagatgaaaagtgcaatgggaagaacagaacaaggtaaagagaatcaggtgtgttagcaactttcttaaaattgtgagggcaggtctcatctagaaaccatttaagtcagggcttgaagatgaagttaagccatgcagttatttagaggaagaaggttccaggcataaaatagcaagggcaaaagcccaagacaggaaacacatctggagacaggtctgaaaggtaatgggattgagggaggcagtcaaattgcttacagacatatagacattatcaggactttcacttttcagaaacaacataagctaggagacagtgaaacatctttaaagtactccaagaaataaagtactaaagaaaaaaaattctttacccagtaaaaacgtatttcaaaaatgaaggtaagtgaagacattcagacatatgaaagctaaaagaacccatcaccaacagaaaatgcaaatgaacctataataacagaaaacagatcaattggctatctgtggatagaacatggggtagggacgggcgagaagaattataaataagcagaaagaattttttggaatcagtgggtatgtccactatcatgattgttatgtcttcacaagtatatccatatatcaaacttagggaattgtacattttaaatatgtgcagtttagtgtatgtcaattacaccccaataacgacatttcttaatggaatccttctcaggaataaaaaaaataacctacagaaaaacatgacatgaatgaatctcaaaaatacactgagcaaaagtaacaagacaaagagtgcatatgtgcaagaatattgagaaaaaaacaaactcagtttctccctacacactcaacaatcaacacaaaagacttctgtgacccaatgtgtgggggttttccctatacaccaaacaagcatttctgcagtgacaccagctgggtgtcctctattgtaattcaattctgacactatctacggggtgaaagcaccataccccatagrttgagggttcagtccccaagacttttaactaccagttccagatgccaatcgcaaggcccaagtcgccttacctgtgcttcttactgaatagctataaatcagggttcccacaagcccctctttgggtttgactaatttgctagaggagcttacagaactcaaagaaacattaaagtttattggtttattataaagaatatgacagtccaggcgcagtggctcacccctgtaatcccagcactttgggaggccagggtaagcagatcacttgagcccaggagttccagacaagcctcggcaacatggcaaaactgtctctacaaaaaatacaaaaataagacagacataatggtgtgctcctgtagtcccagctactcgggaggccgaggtgggagggctgcttgaacccaggagtcagaggttgcagtgagctgagatggtgcactgcacaccagcctgggcaacagagtaagactctgtctccaaaaaaaagaaagaaagaaagaaagattacaacatattcagaggaacaccagagaaagagatgtatagaacaaggtatggagaaagaagcgcagagcttccatgccttttctggatgcgccatcctctccaggaacctccatgtgttcagctatccagaagttctccaaaccctgtccccttttggggttttttttatttatttatttttgaggcagggtctcactctgtcatccaggctggagtccaggggtgcaatctcggctcactgcaacctccgcctcctgggttcaagcgatcctcctgcctcagccttctgagtagctgggcttacaggcacacaccaccatgaccggctaatttttatatttttggtagagacgggttttcactatgttactcaggctggtgtcgaactcctgggctcaagtgatctgtctgccttggcctcccaaagtgctgggattacaggcgtgagccactgcgcccagcctgttttatttttgagacagggtcttgctctgtcacccaggctagaatgcagtggtgccatcacagttcactgcagcctcaatctccttggctcaagccaacctcctgcctcagcctcccaagtagctgggactagaggcacatgccaccttacctagctaatttttctattagagatagggttttgccatattacccagcctggtctcaaacttctgggctcaagcaatccacccacctaggctccccaaagtgctgggattacagatgtgagccacacccagcccttttgggtttttaatgaagacctcataacatagacgtgattgattcaatcgtgaccactggtgaacaagttaactttcagtctcttttcctcaaagttgagggtgaggctaaatcccaaccctctaatccaggttttgtctttcttaggctcccatcctgaagctacctaagggcagctagccattgatcattagcattaaaaaaaaaaaaamaaaaaaaaaaacactattaytttgaagattccaaggatttcaagagttgtataccaggaaatggtgatgaagaccaactatttactcactagcacaataccatgatttcatttatacaattttctaggaaaaaacaatactggtctatagtgacagaaagcaaatcagtagttgctggacaccagccatggggattactgtcagcacaagacaattttttggagttcatggaagtgcactgtatcttgattgtgctggtggttacacagatctatatatttactagtcaaaactcagcaaaccgtacacttaaaatctgtccattttactgtatataatatacacttcaataaagctatttttaaatttttttaagctttcacttgtagtcagttacatatacatacctctaattgttgctgttccattttcgtcaataaaaatttggagtatatattgcttttttcaagcaaatgttgaagtctacggtaccgaatttctgtcgactctctatcccaagacatgcgagcctatccaaagagaaaatttccataattatgaacactttctgacataccttaatttttttggcataaagtttaataaaaatggctaaaataacattttttaaaccaaacactttcaaaccaaaaactggaacaaataactgttaaaaaaaaaatagtttttgggtttaacaggcaatctgatagatgcaattcgtatatcaaaatattataatttcaaatattgaacacatggtttctggcactactgagttggaaggtccatttaaaaaacaattgaaggccgggtgcggtgactcacacctgtaatcccagcactttgggaggccaaagcaggcggatcacctgaggtcgggggttcgagaccagccggaccaacatggagaaaccccatctctactaaaaatacaaaattagccaggcgtggtggtgcatgcctgtaatcccagctacttgggaggctgaggcaggagaatcgcttgaacccgggggaggcagaggctgcagtgagccgagatcatgccactgcactccaaacaagagcaaaactccgtaccaaaaaaaaaaaaaaaaaaattggggccaggcacggtggctcacgcctgtaatcccagcactttgggaggccgaggagggtggatcacctgaggtcaggagtttgagaccatcctggccaaaatggtgaaaccccatctctactaaaactataaaaattagcaggacgtggtggcgcatgcctgtagtcccagctactcaggaggctgaggcaggagaattgcttaaacccgggaagcggaggttgcagtgagctgagatggcaccactgcactccagcctgggtgacagagtgagactccgtccggaaaaaaaaaaaaaggtatgtgtaatttgctaaaacattgatgttgtggttccgtgttattatattaccttgttatgtacagataaggaaaatttttgattaattttgcacttgaccctcataaaaagtgattgcctaggtgacactagagaattctaagacaagttttcagagtctctccctatttgagattaataaacaagttgatttggatagaacattttagaaaaatactaccaacacaattcatcctaacaatcaaaacagacatctagccaagattaacacccccaccccgttttttaaggcatggtctcatgctgtaattggtgcaattgtggcttactgcagcctccaaatcccgggctcaaaccaccctcccacctcagcctcccaagtagctgggactctaggcagatgccaccatgccctgttaattttttgtatttttttttttggtaaagacagggtttcaccatattgctaaggcaggtctccaactcctaaactcaagagattcatctgccttgtcctcccaaagtactgggattacaggcatgtgccaccatgcccaaccaagattaccaattctgtaacatgaatccagcctagtaaatcaacaaacatgtactgcaacaattatataaattatgtaactggtagaagacagaaagtctgatttatactacagatgagacattagtgtaatatctgaaaacaacaagtattaaagacatatacatagcagtaaactgtacagtactatctaaatcctgaaaaattgtaagaattactaaaactggagaagtcagatttcaggaaatagatgacatctgaggggtctgaaggatggataaatgagagcagaaaaactcaagttttgtcaattactgtagaagttcctgctttaagcaacactggcctcagcaacagcactaaaaatcacacttaagttaactttagaattaaaaagattctaaattttatagattagatagtagatatgtttcattttatacaaactcttgacttaaaaagtctagtggcagattttttagtattttgttttctcaactaaaccaattcctctacttttcaacaaggattagtaaaaacacaaagtcaaccaataaaatctaactgcccctttccccagtaattggtggtttcaacttaagaggaaagtaattgagcattgtttacagcgtgtttgaaatgggggatatgaggctgggcgcggtggctcacgcctgtaatcccagcactttgggaggctgaggcgggcggatcccgaggtcaggagattgagactgtcctggctaacacggtgaaaccctgtctctactaaaaatacaaaaaattagccgcgtgtggttgcaggcgcctgtagtcccagctacttgggaggctgaggcaggagaatggcgtgaacccggaaggcagagcttgcagtgagccgagatcgcgccactgcacttcagcctgggcaacagagcgagactccatctcaaaaaaaaaaaagaaaagaaatgggggtatgaattcatttttatactctaaataatgccctagcacttgggtagttttgctgctccagcttatcaatatctctaagatatcattttatattgccttacattttcctagctattacatcatcactatagctttctttcaaaatatatttctttttcttttttgagatggagtctcactctgttgcccaggctggagtgcagtggcacaatcctggctcacctctgcctccgcctcccgggttcaagcaattacctgcctcagcctccccagtatagctgggactagaggcacctgccaccacaccccgctaatttttgtatttttagtagagacgggctttcaccatcttggccaggctgctcttgaactgacctcgtggtccacctgcctcagcctcccaaagtgctgggattataggtgtgagccaccgtacccggcatcaaaatatatttctattataaaatcagtgactacagtaagattctaagaatggacctaacaaaagtaatgcatactcattacagaaaaactaaatgtcaaaaaatatataaatcacccataatcccacctacacagataattcttaatatcttgaactcaattttcagttcttttaggacagaatttcttttactattaccagtatactactgtggttacaatacgcaactactgaggtgaatatgaaaacagggagatgaaaattacttacacaatatatggattcttaaatttttaacttttaaaatttaagttcagttaaaataacgtgggtttaacttagatatagttgataccttaaatcctgtacagaattagcactttttcttttttctgagacagggtctcgctctatcacccaggctggagtgcagtggtgagatctcggctcaatgcaacctgcgcctcccaggctcaagcgataatcctcctgcctcaccctcttgagtagctaggactataggcgcgtgccaccatgccggctagttttttaattttttgtagagatggggtttcaccctgttacccaggctggtcttaacccctgggctcaagcgatctgccccgcctcagcctcccaaagtgctgggattacaggcatgagccaccgcgcctggccagcacatatttttaaaacaactaaatacagccaggcatggtggctcacgcctgtaatcctggcactttgggaggtcgaggaaggcagatcacgatgtcaggagtttgagaccaggccggccaatatgttgaaaccccgtctttactaaaaatacaaaaaaaattagctgggcgtggtggcacgcgcctgtagtcctagctacttgggaggctgaggcagaagaatcgcttaaacccggcaggtgaaggtcgcagtgagccaagatcacgccactgcactccagcctgggtgacagagggagactccgtctcaaaacaaacaaacaagcaaaaaaaacctaaatacttgcctggtgctcctggaaaaatttttcctaaaaaaaaaaatcagctgggcatggtggctaatgcctgtaatcccagcactttaggaggtcaagacgggcggatcacctgaggttgggagttcgagaccagcctgaccaacatggagaaaccccatctctactaaaaatacaaaattagccaggcttggcggcacatgcctgtaatcccaactactcaggaggctgaggcaggagaattgcttgaaccccggaggcagaggttgcagtgagccgagactgcgccattgcactctagcctgggcaacaagagtgaaactctgtctcaaaaaaataaaaataaaaataaaaatcactaaagctttaagatgccatcatggaaaaaaataatatacaattaatattaaaataataccatgtaagtggttaatccttaaacctggtcttctgtatttcaaatcttcctatcactgttttttctttatttatcaatttcatgattatattacggtaaattgcaactccatctattaaaagcactgagtgcctggcaggaaacaactctgggtaactacagtacagagtatgccaatggacaccgagggcagaaattcctcattatctaccccattatctctcccaacaccaatcccagattttttattggggggtgggaggagttctattttagcctacacatatcatgatccttttacctctccaagaaatctcctgactccaactattccccctcctccacttcacaggcactatcagtactcaaatctcctagactaacaatgacttcttttaaagggaaatacatgtgaaaagtcaaagaaaataactgtagccaatgaatgtcaaagtcattttctaggttcctcacaaaccttaggatttcctaaagccaaatgcttctcattaaggaacttaagctagctcttcctctgttaagtacttctaaatacatgcccatacagactgtattctcccaaaagaaaaggaatctctacctgtgcatagttaattgtttggcctccaaagacatgtttattaatctcaagcaggtagagactctgaaaacttttcttagaattttctagtgtcatctaggcaatcactttttatgagggtccagtgcaaaaaataatcaaaaactttccttatctgtacataacaagacaatgtaatacgaaaccacaacactaatgttttagcaaattacacacttatattaagattgaaaacggctacatacttttttttttgagacggaatcttgctctgtcacccaggctggagtgcagtgatgccatctcggctcactgcaacctctgcctcctgggttcaagcaattctcctgcctcagcctcctgagtagttgggactgcaggtatgcgccaccacatctggctaatttttatatttttagtagagacggggtttcaccatgttggccaaactggtctcgaactcctgacctcaggtgatccacccgcctcggcctcccaaagtgctgggattacaagcgtgagccaccatgccaggccatgaaaacagccatatacttttttaatggaaggattaaaaattactctttaggttctatgatgcataattattaaatttaggactaactgcaaaatgtttgttcataagcttaaaaatgtcattaaaagtagcaggtcatttgacctcagcaaatatataaaatactacatatttgacttatcttttttaaatgtgaagtgtttcttccttgaatgaataataccttctgaaaatgtactgttgtcatatctcaggcatatctttctttaaatgctatttccctacccaacactcataatgggtatatgaagaaacaagataaaactgaagatacattactcaagacaaaattatcacatccctcttagacttcttcagttgattccattctgggcacttgccccagaatttatactttataattcatctggttatatagctaataagtatatttagtatatgtatataatcttgtatattataaaataccattttatcatcgttagctattcaataagcacttactgattgcctactatgtgccaggtgcaaagcctacaaaaacaaaacagcaagtgatgcaccctcaagaaacaaagtgagaaagaatcaaaaagtagtatgaagtatttatcattacttatttggtcatggtaaattctgtgtaataaagtactatgaaaattcaaagaatgagaaaaggtggttcaggtcagacctctcaattctgttaattcacatctaccctgaagcaaaaagtattgatgttacttaaagaaaatttgttaatatattaccttaactggttatagtcaaccagagatcatcagtaataacggaaggagtattactggagtggaactatagcatggtagttaaaaaatgtgcattctagaaccacatggcctacactggaatgttagctctgccatttaccaactgtggcacccaaacaacctctatgtgcctcagtttcctcatctgtaaaataagatgactaataaaacctatttggttgtgtagttcaataatagcaattgtttatactagtaattaaactagtaagtttaatagcagtaatagtaataatgaacatctactttacagaatagttgaggattcaatgagtaaatacatataaagcattcaaaacaatgcatgactcctaataaatgttcaagaagtattaacaatgctgacaaaaaaattattgttgacataacagggaaccaacggcctcattactcgtttttggaatgcattattttccaacttaagtagttttataatcatgagttaattcactattattaaggacagaaattctgcaggcagcctgagttgaaatttgacttcaacacttactatgtgcccttctccctcagtttcttcatttgtaaatgaaaataacaaaaaataacctatatcataatatcggt

SEQ ID NO: 97379 - DNA, 13970 bp, Homo sapiens
aggaatgactaaaaaacccaacatagacatgagtaactagaagcctgtctatattaggttccacagtgtgacgtacaaagaactttggaagttcagtgagtagggatagctttatagaggaagtggtccttagaggtctgaatttgagatttgggctttgagcagacattctagggaaagaaaatggctagagcaaaagcacgaggttgcaaagtacaaaatgtgttcagaatgccaacagtgtgtaagggtccctgtaaggttcccatgagcataggctctgggcttggtgaggtgggtcaaagtcaggtgatggtggctgagggagcacctggttcaggaattggggcacgaattcgtgatttttaacttatttactttgggagttatcttaatatccttcaggttcctttcttaccacctgcgtaccccgtctgcctctcccatccaaaatctatatttgtgatttgctaatgcttagccagtcagcatgttttcagttgacttactggtggctttaattatcctttccaggagctggatcagtctggcttctaacatgtctacttaaaaaaaaaaaatttcttattgatagcttgagtgaaagcttcaagggcacttaggtgtaaactgaatatgagaaccattaattcagaaaaatttggaaccctgagaaatcctctaggctaacctcctcattttaaaggaggagaaggagaggaggagaaaagtctcacaagaaatttgcagatctaggagcccagatctcttgactctaaattcagccagagtttttttcactatgctatagaaggagggctgcctagtgggtgatattttggaccccgaagttgggcaacttgagcttgaatcttggctctcagccacatacttgtctgctgactttgggaatggtatcaagcctcaggttgctcatctataaaatggaacaaggaagtcaaatggaaaaacacattagcatttgtagggaacaaggaaaggaggtatattccctgtttatcctgttgtatcagcagcagtctgatgtgtaggcagtcacttccatggggtcttttggccaaaggtgattatctccccaccatggcctgctgccctgccctgagacctctcactcctactccctcttcaggatgaagtactctaaacagctgataaaatagatgagttaccaagacagaatctcacattaggtcatgatgttcattaaaaccatggtctgaatgatgtcctctgattatcttgagccagttgactgatggtggggccaggaggatgatgccctggaccctcattgggtatttgcagcttcttaatagccacaaatctgaaaaaggcaacccaggacctcaaaaagctataggggtccaacccattatctcccctttacctctgtctctgagagcagccctcacttatgattttcttcagtagcaacaatcacagtattcctgggcacttcctacttgggaaagcgtcaatgggtccatttggtaaaagcccccattgagtggtatcccagaagttccatttccacatgaaacagaccttctaaatcactctcttctggccaccaggcaggctcatgggggtaactaagagtaaaagaggtgactctcagcctctggtaagttcacatctttctcgacctctattccttgctctttaagaggagggcttgtctagaagcctagcagatgttaagatgttaagcaggtcttggatttccttcttaaaaggaaaccctcactatccgacataccagtctgctataactggggaaagcaaatgtgtgcttctctttacatatttgtcttgtgcatccagtaaaaagaacaaatgcttataaatatacatttctttttcctgtgggaagaagataaggtcattttaagggctcagaagcaacagttggtggtgctttggaattcatttctgcctctgcagatgagaaaagaaaacactgagaggtgccttcttactagcgtaggccacccttcaattccaggctgccctctgcaaacaaggtgatatgaggagttctggaaagatcttcttgtcaaacagatctactgagtcccctgccatgtagcctaatactttattattttacccttttgggcaaatctttgtatttttaaacattcaaacaaccttggaaagaattgcctgttcatgtctgatgagattgttgaagagcccttgttgaggggtgtcaggagacctcaattctagtcccagctttgcctccaaattgctgggtgaccccagtcacatctgcctatctcttacttgagtttcattacctgcatgaaatggtgacattttacatgcaggaatatctttcccctcgtcttgtgggcacataggttagctgggataggaagagctcttgacactggagaaaaacattttccccaaagtcaagtacctgctcagtcagcctccctttgctgttctggggtcttcagaccagaagagaagcacacatttgctttccccaggctctgaggatcctactgtatcccaggtggtcttggtccctgcagcacctgggcttgcttttccataggcctgacctgtgaggagttggcccctctcacagacctactaagagtcaggggagacaccgtggcagtctgcatatcctcagaggaggggcttccaggcagggcagtgcttggacaggggcactagagacttgtcttggtgttttaattacctagtaagcaattatgttttgttgggggtgtgtgagcgcaggtgttgatggaagttacaggagatgaaagctcctcttccccactccttagcataccttagggcctgcatgaggaaaagaggtgttctggcttgggtttgcctcctgacagttggggagggcagatgccctggactctcatcagttatttgcagcttcttaatagccactaatctgaaaaaggcaatccaggacctcaaaaaggcataggggtccaacccattatctcccctttacctctgtctgacagcagccctcacttatgattttcttcagtagcaacaatcacagtattcctgggcactgccatgtgccaagcactgggaacacagcagggaatgagtccagggttcctccctcatgggatttttccactggtgtgtgtgtgtgtgtgtgtgtgtgtgtgtgtgagggaaggggagggaggcagagagatagctgcaaaatagtaaatcacaaggccttgaatatactagaggtcattccctccctgtaatcagcctccccagatagcttgaagaatcacagcatgttggaaccagtcttgttcccacctcgagagtttgaggaaacaggttgaaacctggtgaaaggatttgtccagaggcctcatggaaactgctggcagacccaaacttgaaacctggcctctgacttctggcttcatcaccccacactctcttcacacaacctgccaccctcagtcctgtttcccctgcccctgatacaggaagaacccccagtgaggtacctcctccaccgatgctaggtggaggcaccagaacaccttccaacaaaaagactcctggacttggctcctgtctgaaaatgcccacaatctcattgtgggtgtcctgaagttttgtctgggcagcgctcctctggtagtaccctcaaaaggcctgcctgctcagggcattgccccgagtttataggccccacctcctttatcagtggagtcctgcctgggtcccaggttcccttggggcttctctttttggggtacctgggaggattcactcctttgtgactgccttctcctgggggctctccacgcccatgggaaggtctggctgggtgaccaactcagggcaagatatgttagggcaatacaggcatgaattctggttcttcctaggtgctagtatcttccttacttactgaagcttttgtcttggcagcaacctggctggacacgttgtgttgtggtcctttcctaggtcacgctgtaggtctatgacagttggatgaaattcaggcttgctaattttcaagcctgcactgcaccaccttgcctctcaagagaatgttgatatgacatgacaagaccctgtgttacctggtcaccacctgccctccagcctcatcttgcagttgtgtagccccgtgatcaaaagtacagcctcagccaggtgcggtggctcatgcctataatcccagcactttgggaggccaaggcaggtagatcatctgaggtcaggagtttgagatcagcctggtcaatgtggcgaaacctcgtctctactaaaaaaaaaattagctgggtgtagtggcaggcacctgcaatcccagctacttgggaggctgaggcaagagaatcgcttgaacccaggaggcaaaggtttcagtgagctgagatcatgccactgtactctagcctgggtgaaagagtgaaactccaactcaataataaaagagtacagcctctggtttcagactccacagattagaatgccacctcgctgcttgttaattatatgactgtgatatgtttataacacatcagcttcagcttctctgtgagaatgtggatgtggtagatttcaaatggcctcaagtttatttacagctcttctcattaaaactggaatgtattttcctatacccttgaaactgggctggccttgggactcgcttccatagaatgtggtgggtagtgatgatgtgtgagtttgagcttagatctcaaaggctttgcagcttctgttctcactcccagagtgttgctgctatgtgacaaggccaggccgaccaccttgaggatgagacgttacgtggagagagatcccagtcataccagccaaagcccccagacagaagcaagttcagctgattctgtgtggagcagaggtgagatgtcctggtggagtctagcccaagttgcctacacacagcatcatgggcacagaaatgattgttgcattaatttaccaagttttggggtggttatgcagcagaagctaactgaaataggggagggtaactacccttaccttataaagctgctgtgaggtttccatgatgatgtgtgcttaagccgtcacctagcacacagcgagcaaatacagttgttactactaacgtgatcctgtggcacctcctctgtcttattggcttctagccacaccaacctccttccttttccttaaatatgacaaactcttcttctttggggcttttgtacttaattctctgaaagggcccttctttgctgtcttgttctcatgattaaggtctcagctgaaatgtctccttcttggacaagcctctgattatcctgggaaccttcctctcttttcatctccattctcgcttcctctcataatgtgtaatattacattgattgacttccttagtattatctgtctccctttctaggttgggaatttttttaagggcaggaactgggcctgtttttattccctattttatccttgctgcctatcacagtgctatgtctaacaggcacttagttgatactgattgaataaaaaaaatcagtctcgatttgaggttggtgctggaccaaatcagtcttgattcgaggttggtgctgggcttccagaaggagaggagtagctaggttagagttccagactgcacgtgctgcttctaattcttgcagcccttttggtttgtgtcatacttccatgttgggtcaaatagccgaatatgttcctgatactctatacgttcagtgggggttggcagcattggatgctcaacaaatatgtgagcttctcaaagacagattgagctcctcacagcacctcgcaaattgtcaggcatctagcaggggcttaacagaaatttattagatagataaatgaatgaatgaataaatgaatgaatgcaaaagaggatgggtggatgagaaagtcctcagaactagtgataatgatataaaagaagaataatgtgaacttaggttggcaggcaactayggaaaaccatgtttatttttaataaaggatgacatttccaawcagtaaaatatcataaaagtataaaaatgtactaagtacaatcattagcattaygttataggggaatagtggttataacttttccctgtaagatgrcacattggatggtcacagttggcttgatttacagaggggcaagagtaggtgaccagttgtaccagttgctccagtttcctaggatttgggactctgtaaaaatgagaaagtcccaggcaaactgggacggttggtcctacaagaaaaagagcagcatcagagtgttggctatagtttggaacttaggaacaggatcagacattattttttaacttctccacctattttccctttagctgtgaaataaaaatcccttttgttattactgagggtgttacagctttcagaggcttttttaccactgggtttcatgtaattttgacttaatacctatgtcaagcctgggaagaaaggcagttctaatcaacttgcaggtgtggcattctgcttcaagccacctgcatcctagagagcaaggattcaaactcagatctcctgaggccactgttctgttctttctggcttttagtagtagccagaaattgggggaaaaattgaggtacctgagatccaagttttgactcaatcccctcactggaaacaattcacatcatcatcactttgccaggtatgtgtacctgccccttattgggcaatcctcatgcaggattcctccaaatacccaccagctggctagtgctggcatcattatatggcagaggcagtgaaacagtgtattagctccaggacagtgctgcaaatggcccttccagtccaggtttgccaggaagatggtcagagggccagctccctgtgtcatttgccaacttgattgaatgttttctggcatctttgctgaggaggttctcaagtgataggtcaacttatggctggtggcatgactcgtaggctcaaagactcaccacacttattgcatctatttctgtactttttgcctactatataggtactagcttaaggtggctcagtaaccctttctggcttattttacaagactagggttaggctatacttgcccacagcagacctggcttctttggacagcctattaaaattctactgttcattcctttaacactgttttgagctttttttatatagttgacatttataaactctagggatargaagtctatataatccttcttttccctgtgaagtgacacttgctctgactctaactgatgcaggccagtgtcttccagaggctggaagggggtttcagcctatccccattctggaataggctgaatggggtttcagattagttctacccttgaagatgtcattgtttaagctcagggttgccctatcatatgggcctattctgggtgcagatgtgcttatatctcctgatttacagggttttttgcttttgttctaagagctgaatgaggatgggcaattttatttaaaaatagatacaataaatagctttaaaaaaagagtgccacctatgtcctcttgtcagattccccagctggtgggacatatggtctgtcagccaaaacaggggtctctggtgcacccgttcccttttgcatgtctattcttcatgcctcttacactagctgtgaccctaaaacactcagaagagtctgtgacactgagttcaaatccacttttctttctggcttttagtagtagctttttagatgtggcttttctttggctyacaggcaaaaagcagaaccaactcgctgtgcctggaagggatgttaaccccgattcagccattactgcaatacacttgagatgaagcccttatgtgcacaagtctcttctgaaactttaactctgggcactgaggggtaaataaacccagaaacttccatatcctgagatattgcctgggttgatacacttcttgaatcttggaaacttacggcactgggttgtaggctacgcttatctagagggtcagaagaatggctttggtctaaaccgatttgagaactcgattcaacaaaaacagcctccttctccaaactgtttgcaagatgtgctgcctgagagcagcagaaaactagaggccgactgggtttcccgtctttgtgtcagaccccttggggccagcacttcctccatggaagtcaaggttgttgaagaaaagaataagactggcacattgtttcctctatgaagaagaaggggtcaagggttatgtggaccagtgactaggtggcctctgttgagtttgtacagatttctgcagctcctcatatggtcagtgaactctgggatcggcgatggctgctcctctttgagcaccggcacatatcagtctgtcctcttgagtaggccattatcctgttaggtcccagcaggtgctccccggatgagagttgagctgaggagtcccctgagcatgagtcatccctcatgcactccgtgccacatctctgttcgtggagtactgactcttccacatgcttcctcttgggagggttagagctctttggggtgctggcactgaagtcctgtcctgtgatagatgacactgggtggtgagttggtcgagccacttcggggacaggggcaggcctctgtctgcttctccaactctggatttccaggtttcttttgtctggggggagtttgtcaattttctgagcttttgagattagagacttcccacaagttccttgcagagacaggaaaaagtatctggtgggaaacaacagaataaagatatttctgatttccactgacttcataaacttcagcattaaaagatagtctttagaatccaactccctgcctggagcaagatcctctttactgctattaaatccatgtctgggcacctctagtcttgggtagctcaacaacaaaaataacaacaaaacataacagctaacatttattatacaccaggactattctaagtgctttatgtattattaactcattttcttttcccaacaatctcatgtggttattacttttgtttgcctctgagtacacttgaggaaactgagggactgagagatttaatgatttgtccacagccacacagtggttgagctatggtcagaaccacactctctgaatccaaagacttgtctcttttttgccatgcccaaagcagtccattctatttctgggctactccaatttaggcaaatttaattgctctgtcatgttaagcctttgtgaaacttgatgattttaaagtacttttagaatccacattcttttcttgaatctgtgggccttgctgtacttgacagtgtcatcatattactatgatttgccagataaagaaataggggccccaagaggtgaggtgagattcctaaggtctcctgagacgttaacggatctccctgttgactgactcaaggattttatccccctgccaagctgcatgcagtctgtagtagactctggaattggaagtctttatctgtgtctagaatcttctctctgttcaaagtgtaggcaaggaaaggggtgagaatgtgaatataactatgcggtgtatggagaaaatatacacaagccgtggcagtgggcaactcacatccactttccagatgtctgttgccttatctgaaaagtaaaaaagtaatctatctgacctggaggacatctaaggtcattcccaaagatagtctttaaatattttttatgtttgaagtcttataagcaggaaggcttctattcttccactatgtctaaaagctgcaaggtgacccctctacccctggccaacccctgccagtgggcaagagatttctgaaaattacagtggatctcatggaaccagataaactttttttgttctctcacatctcacccagtgaggtagtaggggccatgtatgtgtcccaggaaatatttgactttttgcttcaaaactggaatttccttagtataaaccttttcctcaagccactgccttcctcctctattcatttattcaacaaatgcttttcaatttcccacaatgggccaggtccccaagggattaagccatgaataggaaagacaaggtccttgctgtcacgtaacatgtgaatatagttataaatggagaaggcaatgagagtgtcgaacatcaaacacctgatcactgaaattaaatatttcttcctcaaggaaggaagtgctgacagttccaccggccatgtatttctcaaatccacgcccttaaatgtttcttccttgaggaaatgccccctccatttataactatagtcacatgttaaatgacagcaaaaatcttgtctcttgtgttcatggcttaatcctttgggggcctggcccattgtggggatttgaaaagtatttgttgaataaatgaatggaggaggaaggtagtggcttgggggaaaggtttacacacagtaaccttttaaagctgaaaactgcaggatgcataggaggtagccatgccaaagggatgagaatcaaaacctaggcatgatggctgaagcttggggagtgataagagtaggggaatatgtcctaggaggagttggcccaagcagagcagggaggaattgggggccaggtttatggtttttgtgctttattgcagaggtcttgggaagcccttggagggttataaataggtgacatcacactttgagccaatgataatggactagagtaagatccaataggagactaccgaaataatttggggtgaaagggtaatagtctattggtagtagtggctgtagaaatggaaatagtagatgggtttgagaaatacgtagtggatagaactgtcagtacttggtgaaaggctagatatgggcatgagttagcaggtgatgtcaagattaattccctggggcctgcctttgtcccaagtgggtagcatttgctgaaagaaactctagagatacccagatttctggggtggtgccggtgatagagggtggaatgatgaattcaattagaaatgtctcccagtttcctcagacttaatatgcccagtagaggtgatgaataggtagctagaaagatgtgtctggaattcataagagaggtctggggggaatttatggtgaagagtcgtctgctaaaaatttttaaatccatgatagtgattgctttttatggagagaacataaagttagaagagaacctaggggcaagagaacctagggacaagagaaactaggttaagcaaaccaccaaacttattaaaggaagtaaggcctgttgataggtctctaattttgggataaaaagttttgtataattgtctatttgctatcgcttaaaatgataaaatggcttgattgcgatgttcagcgtggtgagatggagagaggctaagtctttcctatgggaacatcatcatcaagttcactgctctgactagagagagtgggctgcggaatagaacactggcctttgagttgggagaacctagctctgactatgatctgtggtaggcctgtgaacacattctggtccctcttggtacttcagctgtcccatgagtggggtactagaaccatagctctgcccaacacttagctcatggcaaaaacaaaatgagaggctagatgggagagcctatgtcaagagtgagctccaaggcaaggcaaggcaaggcatttatagttgctgttgctatttttctggaaaaggcacatttactgcagagggtttaacctggaaatatctgacatagtccctgggcatggattatttgtctaatgcaggtcttgtatggaaggtgtgtgtttaaacaaatttgaatagtatttaaacactggcaatttcatgcacaatttgaatttctgggaaaatgctgaagctctggaatgtttgacttgatctttccttgtggccatgatagaagctgagaagctctttcttccaatatctgtactccatctggcttgctgaacttgctggcctgtccctgtaggcatttgagtataagattcctggactaatacaataaaggaccatagagcttctcaaaataattccttactacacaaaaaatttgtaaggcaggagggtaggaattgatactcccattttatagatgtcacaactgaggtcacactgatttggtgactttgctactttgtggctaacctgggaccacagtccatgttatttgcctcctttgtcattcattgttctttctgtcccatctctctgtttctgaaacattagcctcaaggatgccagcagaagtcaaactcctgactcttgggttataaaaatggcttattaaagggagattggtaattttaggaaagaaacacagccctagtgctcaaaccttgggagaagagcaacaactggtgtgagaaagcagacgaggtagaaagtggggtttgagagctggccttccatcacccaatagggattggtggggctgttgcagatgacgcaggtggcattgtacaggagggataccagaaagtacatcaggaagctgccgaggagcacgactccgtggaaaatggtctgtggagggaaataagcaaacactgttgaaggtatagctgagattaggaggcagggtgatcaaactacttgattaactttgtttcaaactatttttgaaatgcaaaacacacaaaattcaaaaaagtgtgcagcttaatctatcattataaagcaaacaccagattgctgccatgtagaattgaacacacataccccagaagaccctattctgtctcacccctgcttttggtgataatttctatgctatcctttgtaggtttaccacctatctaggttttccaacatagcctgtttttaaatggataaatagaatcatgtttcgtatgactttttgttttttttccctcaatattatgtttgtgtgatgagcccattttttccacatggcagtagtttattcattttcaaagcagcgcagtattctgttttttgatcgtattttgtcctgcctgttttgtgcttttcttttcccatccttgtcttttatttttatttaattttaaaaattgatactagatgtatatattttcagggtacatgtaataatttggtatattcatatataattagggtaatcatgacatccatgactttaaatattttctttattctaggaatattcaaatgattctcttctagctattttgaaatacacaatcggctaatgttaactatagtcattctattgttcttttaaacatattgactattttgtataattttgggactattcttttagtgattactcaataagtctaaacaagcaaatatactgcagtctaaacaagcaaatgtactgcagtctaaacaagcaaacttactgcagtctaaagcttacaactagttttccatcctcctgaattacacacgagatttagagcactttaactctctttacatccctcctggctaatatgttttgctgctgttttaattctgtcatcttttaaaatcactcaactcactggcattattgtttgtatggtcagtattcactaagatctactcacatgtttatcacttctcacgcctccattccttggaccctccacccgaggtatctttttaagtgcatcctgtaaaatgtcctttttgggagtctgacagtgatatgctctctgatgctttatttcattgttcttgaaatttgtcttttgatgaatatggaattcttgttaggcagctattttccttcaatgtgtttaatatggcattccactgtcttctggcttccattattgctattaagaagttattaatctccacttgttcttccttagaaggaaatctttatctcttaaagcctgcttgcttttataacttttttttgtctttttgatctatagttttctatgacagagtaagtatgaatttctttttatttatcttgcttgggttttgctgagctggaatct

SEQ ID NO: 97380 - DNA, 14207 bp, Homo sapiens
gcatggtggtgagaattaatcatcatccaagagcctggctcataataagcgcacaatagtattgttattttcattatgaaccatgaaatatttcagctgaaagggacctggaggccatcaagcccaactccctgtttactgataaggaagctggtcccagagggagcaggtcgtttgtcaggaccatagtccataggcaaggaaacccagaactcaagagtggctgtttacttctggttacctgttcagccagggccccagccacccatccccacctccagtggctttcttcgtgtgctggacttgcagatgtttttgccctactgcaatttttgtttgtttgtttgtttcttggttggtttttcaagtttgcccttgcttgttttaatgtattatggatggcttatgtgagtaacctatattgtctcattggactaagtgctacattgtagacaaggccagccttgccttctcagccctttttctatctgagtatgtggccctcatcaggcacatgtccagggacaccagctcatgagtggcaaagctggtttctcagcccagatctccaggtgcagctgctcagagttcatacccttgtcccagactttcagtctctgcttatccacccaaactttcttaagatcagttttgctccaaatgatgtggcaaagcctttgatcagttgtaacttgaacagccttttcaaaaaatctgatattggctgggcatggtggctcatgcctgtaatcccagcactttgggaggccaaggtgggcagatcacaaggtcaggagttcgagaccagcctggccaacatagtgaaacctcgtctctactaaaaatacaaaaattagctgggtgtggtggcagggacctgtaatcccagctacttgggaggctgaggcaggagaatcacttgaacccaagaggtggatgttacagtgagccgaaatcgtgccattgcactccagcctgggtgacaagagagagacttcgtctcaaaaaaaaaaaattggctgggcgtggtggtgggcacttatagtcccagctactcgggaggctgaaggaagagaattgcttgaagccaggaggcagagaggttgcagtgagccgagattgcagcactgcactctagcctgggtgacagagcgagacttcgtctcaaaaataaataaataaataaataaaaataaaatctgatattgatagtgattttttctcatagtttacttgctgacctttgttttttttttttatataatgtttttatttttactttatataatgatgtattgtgcatactccataccaggcataaaataccaaggattttatttgcatatatataagatgatatatatataacagatacgctaaattatatatacatctatatataaaattgtattcagttctcaaaccactctggcaagctggtagtattcctgttttgctagtgagaaaacaggttgaatgtgacttgcggtgcgttgatggattatagacataagaagcacatggacgctggtccgtcatgtcaaaatcccagatggcagcaagctgctaatattgacaggttctaggattcaggtttcctttttgctgaggagcaaatgctgaatgttagtcttatgccctgtgggtctgcatatttaacagcagttatcaggccttggctaattttgtttatacaaaatgctttcaaacttcataggtaatctccctgcccgccccaccaaacacacacaaggcctcatttctttaccagcgtgttgtaggatggaccgcatcagcagttgcctctgcagcatttcaccctggcttgtgtgtggaggttgggaggggccaacctgtgctgaggaggactcaggagaactggggacacagcaaagcccttaggatggatactatctttcttatcttttgggtccctttggcatttcaataacagtatctgtgttctctggagcttcctttaaagaaccttaggatccatttcttcacgtgaggaggaatcagggtgctgacccctggacacttaaagaaccttaggacccatttcttcacatgaggaggaatcagggtgctgacccctgggacacttaaagaaccttaggacccatttcttcacatgaggaggaatcagggtcttgacccctggacacttaaccttaggacccatttcttcacatgaggaggaatcagggtgctgccccctggacacttaaagaaccttaggacccatttcttcacatgaggaatcagggtgctgccccctggacacttaaagaaccttaggacccatttcttcacatgaggaggaatcagggtgctgccccctggacacttgaagaaccttaggacccatttcttcacataaggaggaatcagggtcttgacccctggacactttaagaaccttaggacccatttcttcacacgaggaatcatggtgctgacccctggacatctggtgcccctgacagtgcccccacagtagcaacaatagcagatgacagtcagttatttagaaatgggcaggagcagccctggttttggccatctgcttgctttgcacccagcagctacttgcatgcatctgaaagcaccagagtgagggtgtgtgtgcctcccaggcagtcttcctgaggcagctgttctcaacatccatcctcctggcccctgatctgcaggaacctccccaaccgcctggcttgtctaggcctgtagctgggaaggaagagacgaagacacagggagaacacaccgggactccacacctgtaaccacattctgtttgttcgccctaggaaagattgctgccttttcagcagaagggaaattcctaggattggctgtcccctgccaagcttggtggagcgtctgcaccttggctgcgccgcctgtgcatttgccagtttcctcccactgagaggatggaggtgtccgcacagctttgggcctcgtgagggatctgcctcctgagcaaagagctcttgatcccgatttcatgcacagccctgcagtaaggagcccagaaggaacatgtgtttcctgttaaaactcctcttgttctcttttcttacattatgacgtttgttttcaaggagagggtttaaaaatgggatcctgtaagcagacttgggcagtctccttttgaaataggttgtctgtacatgttctaatgttttgtagaacacgtgtgcctgtttaagtgtattgatgtgaataatattaaatatcctaattatttaattcattgtattgtttctgagaagttgggaaattaccattatacatttacaacctaatgacttttgtattttatttttcaaaataaaagctttcaatgtgaagcattctggtagttacatgttttcattaatgtgatttcagagaagcacagaccttatcagatgctgatgtgataaaccaaagtttccttggttggctgtattgtagatactcccctggagccatcacctttttttggaggggggtggtgggtagaggcagggtctcgctacattccccagcctgggctcaaacgatccttctgcctcagcctcccaaagtactaaaattacaggtgtgagccacggtgcttggcctgcattatcattttgtagtgaagttttctttttatttcaagagagaacctattgccatccactttgagaatcctgttctatttcatgcttgcagactgtatttaaggacatggaagttactatttccacttgttttctagaagcctttgttatgaaacccaggatgtccagatagtagtaataattcccatattgagtgtgttcacatatgtgccagccatgaaaagggtgtataacatgttatcccatctctgccccaaaacttgtacctatccatttaggtcatatccatatcagtaattgcagtattttctactgtcacttgagccagaaactgaagagtcacacttgatttcacccttttcctccctctttccattcgcatccaagatctttgatcctaccttcaacgtattttttggatcacagcagaataagagtttttagaatgcacatctggacaggagcctccccgcctgaaacatttcagtggcttccatttcacttaaaagagtccagactcctgtcagggccggcagggtcctcctctccatctcatcgcaggcctctctcccaacctcaccgcttgtgctctagaagtatctttattttcagaacatagcaagttcttcctgtctctacatatctcctctctctggaatgttcttccctttggctatttaagatgaagttttgctctgtcacccagctggcctgcagtagcacaatctcggctcactgcaacctccgcctcccaggttcaagcaattttcctgcctcagcctcccgagtagctgaaattacaggcatgtgccaccacgcccggctaatttttgtatttttagtagagacagggtttcaccatgttcaccaggctggtcttaaactcccaatctcaaatgatcctccctcctcagcctcccaaagtgctgggattacaggcgtgagccaccacacccagccccctttgttctttgtctgataggctccttctcaattctgtggtctcggtaagcctcacttactcagagggattttccctggcctcttaaactaaaaggtaattctcccgctgcttgccttcttcatggtcacactttgcagtgtttcatctgtttgttgccttttttattatctgtctcctccaccagccaataagttcctggagttccaagactatgttttttcttgtctgttgtacttttggcacctagcaaactggcactttctagaaaccaagtaaggccggtcgcagtggctaatgcctgtaatcccagcactttgggaggccgaggtgggcggaccacaaggtcaggagatggagaccatcctggctaccacggtgaaaccctgtctctactaaaaatacaaaaaatcagctgggtgtggtggcgggtgcctgtagtcccagctacttgggaggctgaggcaggagaatggcatgaacctgggaggcggaggttgcagtgagccgagatcacaccactgcactccagcctgggtgatagagcgagactccgtctaaaaaaaagaaaagaaaagaaaagaaaccaagtaaaatacttggtgaattactaatcctccaaagagccttctgacatacatactgttttacagatcaggaaacaggctcaactaggtcaggtcacttacacaaggccccccacctagtgccacaggtgacttggcatgtagctgggcccaggcacaagcctgactctaatgtcctctgcagtccacttccctagccctgtccctttccatttaaaatgaatatgtccagcctgggcaacataaggagaccctgtctctacaaaaaaaatttttttaattagccaggcatggtgtgcacctgtaatcccagttactcgggaggttgaggcaggagaattgcttgaacctgggtggcggaggttgcagtgagccaagatcatgctactgcactccagcctgggcgacgagggagaatctctcaaaaaaaaaaaaaaaaattaaaaatactgctgtcagatcaatcttgtgtttaacactgttttaagtcactcatttgctccaaaacctttaattctccaatgcctaacattacatctaaatgtctaagctggccaggcatggtggctcacacctgtaatcccagcactttgggaggccaagaagggtggatcacctgatatcaggggttggagaccagcctggccaacatggtgaaactccatctccaataaaaatacaaaaattagccaggtgtggtggcacacacatgtaatcccagctactcgggaggctgaggcaggagaatcacttgaacctgggaggcggaggttgtggtgagccaagatagcaccattgcactccagccttggtgacagagtgagactccatctaaaaaaattaataataaatgtctaagctattctgctgccacaatgtggccttactgctccctgatatacggtgcctttctcctcccttgtttcattctcttcactttcttcttccagatgctcgtacacccagtccccctacctgggaaatcacaacctcattaagagctcagctatcttaagtcctatttcctcatgaagtctaactcaactgctgcaacttccgagtagcaattaaatcagctccagcataacctcttttttcccttgtctcctgtgttagtattatgtcactaactttgtggggacaaggtcatataacactctagagcatatcagaatgacagaacatcttcagctataacctacctagataccaatatttgcccccaaggcaatgtttgatttttattccccattatgagaaacaaactcacccctccaaacccaaagaatggactcagagacctggagaacagcgaaagtgagacttttaatgatgctcttgtaatattgggtgtctggcagcaggcacacccagcacagtttcaacaagcaatttatcccctagtgcacaggtgcctcccccagttcctcatgggctgtgtattatggggtcacaatcttcccggacattgcctattggtcgttgggtaggggcttygggtgttttctttagggttgtcctgctgcgttttgttgcagcccacaatgcattgcaatcctagttagctcaggggctcttcaggtatttgacttatgacttaagtagctggggcaggctgataagaacaggcaacacgagctattttgcagctagtaaactttcatcttagactaaacttctttggttcaggtgagggtaactaagggggttgsgggggggtgacaagcaggcattggctgtccaagcaggagcctactgtatcctgttttcttctgtagtctactgacctaagttgatttaaggcactttgtcttggaaatggaccactgtatacatttccttcacccagctaagttttaaattttttttgtagaggtggggtctcactctgttgcccaagctgctcttgaactcttggcctcaagtggtcctcctgcctcagcctcccagagtgcttggattacaggcatgagccacctgttcggccatcattgtttaaacaaaaaagtttagaggactcccaactaggaactattgcaataatctgggccasataytattctagctgggttgaaacaatgaccaaaataaaaaggaggaagatggggaaaggctgggaggtgtacaaccgacaggacttgcaagtaagcagatctggtggcaaaggtcagagaaaaccaaagaagactcccaggtctccaggtgatgaggctagacatggtacatggtagtgctggcagacagagtgggagtgcataccacyacacagttggcccacacactctggctgcaaagggccagggaccgtgtggtctccagcttgctgcctgaatttggacaacccactcactctcactgcctgtcttcacaatttgaaaatgaagctaaaacaaacccgtctctagcttgttttgtttttgtttttttctgagatgaagtcttcctctatcacccaggttggagtgcagtggtgcaatcttggctttctgcaacctccgactcccaggttctagcgattctcctgcctcagcctcccaagtagctgggattcaggtgcccaccaccatgcccagctaatttttttgtatttttttcagtaaagatggggtttcaccatgttggctaggttggtctcaaactcgtgaccacaggtgatccacccgcttcagcctcccaaagtgttaggattacaggtgtgagctactgcacccagcctccagcttgttttaagaatccagtaacatgattatgtttaacaattggcttagatattcagaagctagctggctgggcgtggtggctcacgcctgtaatcccagcactttgggaggctgaggcgggcagatcacctgaggtcaggagtttgagaccatcctggctaacatggagaaaccccgtctctactaaaaatacaaaaaattagccgggcgtagtggcacatgcctgtgatcccagctacgcgggaggctgaggcaggaacttgcggtgagccgagattgcgccattgcactccagcctgggaacaagagctaaactccatctcaaaaaaaaaaaaaaaagacattcagaagctgctgatgtgaacgtttaatgaatttgttttttgttttgttgtttgtttttgttttttgagatggcgtctccctctgtcacccaggctgtagtgcagtggtgagatctcagctcactgcaacctccacctcccgggttaaagcaattctctgccttagccaccctagtagctgggattacaggtgcctgccaccacgcccagctaatttttgtatttttagtagaggtggattttcaccatcatggcccggctggtgttgaactcctgacctcgtgatctgcctgcctcatcctcccaaagtgctgggagccacctcacccggcccgttgaatgaatttcatgagtaaacaaattagatcaaagtaagtggattccatgaagccgagaatgatgtcttctggatatgccacctggtaacccctccttcagcgcactgtgccccttgacaaacaccatggggagcaggaacagaggaggtgggtggggagcacagggacaggcatggtgacatccgctcctcccttactcccgtcccatccacccctttctataatacaatcatttaacaatggtttcccatgtgtaaaatacttgcttcattcaatcacagaatagacacttggtattcaaatttactgaggaagaaactgtttcacatgccaagtagcaacttgaaaaaatcaacaacccttaattagttgtattattgaagtaaaaccaatgtaagggatgtagtgtttatccaggcaagcctggttggcttcttggcttttttatcttccccatttcttcctccttcttaaagtgtaaattttattttcaaaactgggaaaagaggagttcaaggtgggaggtggaggcaggaggatggctttagatcaggagttgaagaccagcctggtcaatattggaagaccttgtgtccagaaaatttttttttttttacttagctgggtgtggtggtgcatgcctgtggtcccaccctctcaggaggctgaggcaggaggatcgcttgagcccaggaatttgaagctgcagcaagctgtaatcatgccactgcattccagcctgcatgacagagcaagaccctgtctaaaaacaacaacaaaaaagggccagactcagtggctcacacctgtaatcccagcactttggtaggctgaggcaggaggatctcttgaggccaggaatttgagactagcttgggcaacatagtgagaccgtgtgtgtgtgtgtgtgtgtgtgtgtgtgtgtgtgtgtgtttaatgaggtgttttggaactgccactatgtagacgtccactgctaaagggctgttttgggtcataaccaagacacatggcctgagagcctgtgatgattatttgtgtttgtgcaaactccagagcagcccaagctcctagactaagtgacactccactctgtaagtcttgagcagaatataaagagagacaggtcattgtctccagcatcaaaggaatgaaccaagatgttgattttgaagagccaacacttccccaagaagcctccacagtgtgacctcacagggcttacactggcactgagtgtcagaattaaggcatctgaggctgggccacattcttgcagaggcctcactcaaaacatggcctggagtgatcaaaagatgttgatgtggcagctcctcaccagatgtcctgctcccactcttgctcctccatgtccagtctcttgacaagcagctgaaatgttctttttagtttttttattttttctttgagaaagagtcctgctctgtcaccaagacttgagtgcagtggcgtgatctctgctcactgcaacctctgcctcctggattcaagcaattctcatgcctcagactcccaagtagctgggattacaggtgcataccaccatgccggctaatttttgtatttttttagtagagatgaggtttcaccatgttggccaggctggtctctaactcctgacctcaggcgatccacccgcctcggcctcccaaagtgctgggattacaggcatgagccaccgcacccggccccttgatacttatttattctaatgacatttattgtgtgcctactatgtgccaagtactatattaggttctgagaatgaacaagatatgactcctactgtagggagcctctgttgtgattcgctgtgagtttgggaggaggacatgcagacaaggaattcaataaataagctgatttttgagttgtgatatctggtttgagagaaccaggcaggacgaggcattgaaaaggaggatgattcccccttcacaggatgagggaggatttctctgcaggggtgatgtgtgagctgaggtatgaaacatgagaaaaatccagctatggcaagaggtatgggaagtccatttcgggcaggggagagcatgtgcaaaggtcttgaagagggaaaccacttggcatttacaggagcagaaaagaagcccagatgcctgatgcacaatgagcaagaggaaaggaatagagggtggcagacagggtccgatcatgctaggattggtttgttttttaagagacatggtctcactctgtcacccaggctggagtgcagtggggcaatcatagctcactgcagcctcaacctcctgggttcaagggatcctgtcatctcagcctcccaagtagctgggactataggcctgagccccaccatgcctggctaagtttttttattgttattagagatgacagtcttgctatgttgcctaggtgggtctcaaactcccatactcaagtgatcctcctatcctggcctcaaaaaacactggaattacaggtgtgtgccaccacatctggccaaaattgggaatttcaaaatgctttacttttaatttttgtgggtacacagtaggtgtatatatttatggggtgcatcagatgtcttgatacaggcatgtaatgtgtaataatcacatcagggtgaatgggatgcccatcacctcaagcatttgtgctttgttttacaaacaatccaattatgcctttttttttttttttttttttagacaaagtctagctctgtctgccagactgcagtgcagtagtgtgatcttggctcactgcaacctctgccccccgggttcaagcgattcccctgcctcagcctcccaagtagctgggactacaggcatgcaccaccacgccccactaattattgtatttttagtagagacggggttttgccatgttggtcagactggtctcgaactcctgatctcagttgatccgccgaccccggcatcccaaagtgctgggattacaggcataagccaccatgcctggcctcttttagctatttttaaatatacaataaattattgtttagtgtagtcaccctgttgtactgccaaatactacatcttattcattctaactgtatttttgtacccattaatcattcctgtgcaccctctccagcccactacccttcccagcctctggtaaccgtcattttaccctctatctccatgagttcaattgttttattttttagcacccacaaatgactgggaacatgcaaaatttgtctttctgtgtttggcttattttagttaacataatgatctccagttctacccatgttgttgcaaataatagaattctattctttctcacggctgaataatattccattgcgtatatgtaccacagtttctgtatccattcacctgtttgtggacacttagattgcttccagatcttggctattgtgaatagtgttgcaataaatatagaaatgcagatatttctttgatatattgattttctctcatttgggtagatacccagcagtaggattactggatcataaagtagctctatttttagttttttaaggaccctccaaaccgttctccatagtggttgtactaatttacattcccaccaacagggtaccagggttcccttttctccacatcctcaatagcatttgttactgcctgtcttttggatataagccattttaactggggtgggatgatagctcattgtagttttgttttgcgtttctctgatgatcaatgatgttgagcaccttttcatatacctgtttgccatttttatgtcttcttttgagaagtgtctgttccgatgttttgtccattttaaaatcagataattcgattttttgtgttgattttttttcccacctgaactccttatatactctggttattaatcccttgtcagatgagttcaggattgggttttgactttttttttttttttttttttgagatggagtctcactctattgcctgggctggagtgcagtggtgccatcttggttcaccacaacctccacctcccaggttcaagcaattctcctgcctcagcctccccagtagctggtatcacaggtgcctaccaccacgcccagctaattttttgtatttttagtagagtcggggtttcaccatcttggccaggctggtcttgaactcctgagctcgtgattcacctgccttggcctcccaaagtgctgaaattacaggcgtaagccatcgcacctggcctgggttttggtttttacactcaattctaaatcattaaatgctgtcaggtggagaactgacataatattcgtattggaagatcattttgtatatcagctatctattgctgtgtaacaaaccaccccaagcttaatggtataaagttacaatgatgcttattagtcttctcacaacactggaggctgacgagactcacgtaggcagtactgcctttgtatgtcttatgtggttgccttcaaacagtatgcagttagaatagtctcaatggtttccttgctcaaatatctcctggttaatatgggctgttagctagggcctcagctggggctatctggtggaacacccacacatcacctccatacgtggcctgggctttctcacaaaatggtgaatgggttctaagtgcatccatcccaggaaggacagccaagtggaaacagtgtcatcttttatgacctaactttggtagatcatgtgcaacacttccactgtattccaattatagaagcaggggactaagttcatattcaagggaagaaaaactagattttttttttttgagatggattcttgctctgtcacccaggctggactgcagtggcccgatctcggctcactgcaacctccacctcccgggttcaagtgattttgctgcctcagcctgctgagtagctgagactacagacacaaaccaccatgtcctggtaacccgcctcagcctcccaaagtgctgggattagagctctgagccactgcgcctgacccgaaactagattctatctctcgatgacaattataaaaaaaaattgcagacaactattcacaacagtgaaggtaagggatcaacctaagttttcttccatcaatggaaaaaagaataaagaaaatgtggcggctgggcacagtggcttatgcctgtaatctgtaatcccaacaccttgggaggccgaggcggatagatcacctgaggtcaggagtttgagaccagcctgacaaacatggtgaaaccccgtctctactaaaaatacaaaaattagctgggcatggttgtatgcacctgtaatcccagctacttcgggaggctgagacaggagagttgcttgaacttgggaggccgaggttgcagtgacctcagattacaccactgcacatcagcctgggagacagagtgatactccatctcaaaaaaaaaaaaaaaaaaaaaaaaaaaaggctgaacacatagaaaattcttgatatagacaaagtgaatcagaggttaaaagaactacattaaagcaactgaaaaaaaattatggaaattagagacagtagtctaatactgggttgtcagttggtgaccctgagttagacaacctaaaaaaatgaaacagggctggctgggagtggtgactcatgcctatattcccagtgcttt

SEQ ID NO: 97381 - DNA, 15891 bp, Homo sapiens
gcgacccttcgtgtgcactgaatgcggcatggagttcagccagattcaccacctcaagcagcactccctcacccacaaggtaaggccgttcccagggcctgggcatctgcctgcccctcctgccactttttcatccagtactttccaaagtcccagatgggaccatttaggtggtctcctagttttatcgttacgtacttattttgatgagtattagaaatcaattagtattagaaactaattgaaattagttttttaagtagtaaagctttatgcattcaaaaacatgtatttggccaggcacaatggctcatgcctgtaatcccagcgctttgggaggccaaggcaggcagattgcttgagtcctggggtttgagaccagcctgggcaaaataatgagaccccatcgctacaaaaaaatttaaacatggctaggcgtgatggctcatgcctgtaatcccagcactttgcgaggccaaggcgggcagatcacctgaggtcaggagttcaagaccagccttgccaatgtggtgaaaccctgtctctactaaaaatacaaaaattagctgggtgtggtggtggatgcctgtaatcccagctacttgggaggctgaggcaagagaattgcttcaacccgggaggcagaggttgcagtcagccgagaccacaccattgcactccagcctgggcaacaggagcaaaactccatctcaaaaaaaaaaaaaaaaaaaaaatttaaacattagccgggtgtggtggcatacacctatagtcccagctacttggaaggctaaggtgggaggaacacctgagcctgagaggctgaggttgcagtgagctgaaatcacgatactgcacttcagcctgggcaaccagactgagaccctgtctccaaaaaaaaaaaatcatttttataacccctgcaagacccaaggaacacagtttgaggatcactgaagtatcttaccctccctattttctagatgggaggacagaggccagagagaggccaggatgcaacagggaggcgtcctggctcagtggtcagaagtacagagggtgtcctttgttccttgtcattacaaaagcaaatcaaaacctgtgacttccctttaagaacaggctaaatatatttaattttcaaagcagagaagatgtaaggaaaaatatttgttatggaaaagtacaggtagttctagaatatggctaaactaggcacagtggctcgggaaggcagaaattgagcagcactttctaatctaccatgtccctaaacccagccttgacccgtactcccctgccctccattccccgccttcagccaccagcctccccgcttttcagccaatatcacctcctctgagaggccctcatatccgggtaggtggaatgaggccccttgggtcccacaatcccactctggtacttggctgccccatggtttccaccgaaatcccaccaactttacccttcaaagctgaatgtacatagagcttcctctccccataacggtggcctatgagtgatactccaggtcaaacttgtgaccctgtctctcacggtagacactatagggagttggggagctgttaataccctgccaggcctagaaaccagcaatttgtaggtttcattgcagaggctcctgcagtcaactgctagtagctgcctaaaatgtaatgtcaagaaagagtctagccaggcatggtgctgcacacctgtagtcccagttactcaggaggctgaggtgggaagtttgcttgaacccaggagtttgaggctatgattgctcctattaatagccactgcactctagcctgggcaacatagcaagacatttttttttttttaagaaaaaaaaaaaggaagaattctgggctggatgcaatggctaacagtaatcccaacactttgggaggctgaggcaggagaatcacttgagcccaggagtttgagaccagcctggctaacatagtgaaaccctggctctactaaaaatattttttaaaaatagctgagtgtggtggtgtgcacctgtagtcccagcttgaacccaggaggcagagattccagtgagccgagatcacaccactgtgctccagcccaggtgacagagcaagactctatctcaaaaaaaagaaaaaaatcaaaaaattagccaggcatggtggcacacacctgtggtccagctacacatgagactgaagcaggaggattgcttgagcccaggaggtcaaggctgcagtgagctgtgattgcgccactgcactccagtctgggcaacagagcaagactctgtctccaaaaagagaaaaggattctgaaactgaatctaggcttggcaataaaaccctatgatggattgttaatgtctgcaaggagtgattgtgcagggtgacagcatatatgctatatatttgccatctttctcctctactgggggacttaaaaatcccaagtccagggcctggcacagtggctcacgcctgtaatcccagcactttaggaggccgaggcgggcagatcacaaggtcaggagttcgaggccaacctggccaacatggtgaagccccgtctctactaaaaatacaaaaattagttgggcgtggtggtgggcgcctgtagtcccagctactcgggaggctgaggcaggagaattgcttgaacccgggaggcagaggttgcagtgagccaagaccgtgccgctgtactctagcctgggcaacaaaagcaagactctgtcttaaaaaaaaaaaaaaaatcccaagtccacagagtgttaatactgtgaagaaaagctgaaagcaaaaaccaaaggctaataaaactggaaatgtccctattatcagcctaaatttgtacaatgtgcacatcatgtgtttataaaagaaactcctgaatggcagggccccctggtggtcatacacatctgcgatgtgtcaggagggggtatacagcacaagacacagtccctgctgctaagagacatagacacgggaaccattaagttataatacaaagtttttataccaaacaagcagttaagacagcagctgtgaccacagacacatgtcccactgggttcctactaaattactaactcatcaaaaagaaaacagctcccaacttaaaaaaaatttcttttatttatttatttttactctttttttttttttttttgagacggaggcttactctgtcacccaagctggagtgcagtggtgtgatctcagctcactgcaacctccgcctcctgggtttaagcaattctactgcctcagcctcctgagtagctgggattacaggcgcataccacgctcagctaattattgtatttttagtagagatagggtttcaccatgttggccagcctggtctcgaactcctgaccttgtgatctgcccaccttagcctcccaaagtgctgggattacaggcatgagccaccgtgcccggcctttttcaaattttagagatagggtcttgctatgttgtccacactagtcttgagttcctggcctcaggtgatcctcttgcctcagcctcccaaaatgctgggattacaggtgtgagccaccgtgcccagcccagctcccagcttttatcctaattttcctccatggataataaattggacccctttgcacacaacaccctgtcctgctctgggagtgacctccaaaccgtagaaaagaaagttcacagtccaaaccagtgggttttctcctggaatccatgtctcctgggggtgaatagcccaaagtccatcaatgataagaatcatctgggggccctgttgagaataaaaattcctgggcccatcccaggccccatgaattagaccctccagggagcggcctgcaaggctgtatgttggatgagaactacaggtggctgttatcaccagggaaattaggaaaacactttcaagagatgagtggataggctctgggagtttgagacccttcgaaattctacatagacctaagtgccatttttgggggggtgtccatagcttcaatcatattatcaaaagggtctgaaccaaaaaggccaccaagagacagcatggaggataaaaacacatacacgtgtccttgatctgatgaaatagtccacagacagcgggcagaccctgtgtcttcttggcgacagacccctgccgcctagtgtggtactggcttggagcaggtgcccggtaaatggttgttgaatgaatgaatgaatgagcacacatttgccttagtgcactagtacagaccttatgtacacatccaccctgggggcaggagacagcaggtatctggatcgttacagtaaagcacagcctatttctattactgaaaggcttcctggagtaagtggctctgcccccacattcttcggtggttttaaacaagtgttacctattttggaataccctcaaaaagagacatttcccagaaagtgtgcctttgtgatgctatggccctgcccctacccggctccccacaaagggtcactgccagaggctgtgcccattgtgtggccctgaccatcaccccccaccccacagggcgtgaaggagttcaagtgcgaggtgtgtggccgggagttcaccctacaggcgaacatgaagcggcacatgctgatccacaccagcgtccggccctaccagtgccacatctgcttcaagacctttgtacagaagcagactctcaagacccacatgattgtacactcgcccgtgaagccattcaaatgcaaggtacccggtcatcaggccccggggctgggacctccccgagggtggtctggaatcagcatgcctgcagcagctgtggcccaccaagcgccagcctggccagtgcgggcaagaggagccccggctgggtgaaacttagcctgggctttgggggttgggagggcaggcggggattcacatcctgaaagctgctgaagttgggtttttctgagagctggggagggagtgaaggtcatggtgcagccacagagaaaggaccccagcctgagggcttagtgcagctagagatccaagccctgggtttctgataagtgcagctcagagaaagtggggcagactcacaggagcagtgacccccaatggatggcttgtgtccctgtctctcgggtgtctggggtcacatggaaaagcataaagagagaactgtccataaagaacaggattctgggccaggcatggtggtgcatgcctgtaatcccagcattttgggaggctgaggtgggtggatcatttgaggtaaggagttcgagaccagcctagccaatgtggtgaaaccccttctctactaaacatacaaaaaattagctgggcgtggtggcacgtgcctgtagtcccagctactcgggagactaaggcaggagaatctcttgaacccaggaggcagaagttgcagtgagccgagatcatgccactgcactccagcctggacaacagagtgagagtctgtctcaaaaaaaaaacaaaaaaaaaaaacaaaagaataggattctggcccagccatagaggtgggagtgggctggggtccggggaaagcaggttccccacaggctcaggacaccgggttgatgtgttctaggtgtgcgggaagtccttcaaccgcatgtacaacctgctgggccacatgcacctgcacgccggcagcaagcccttcaagtgcccctactgctccagcaagtttaatctcaagggcaacctgagccggcacatgaaggtcaagcatggcgtcatggacatcggcctggacagccaaggtgggtgggccaagcgcaatggacagagcaggaatgataccaacatgacgcactcaggagcctcctgcccagttagaggagtggggaggctggccaaggctgagacttcgttggggtgggctcaggtctggaaggggggtaccctggaaggccatgatgacaataacgatgggatatttatgtcttcttcaaaggacttaaatgagatcacgtaaacaatataataaaaatcataactaacatttattgagtgctaactgtgtgccaggcctttattaactcatgtgatcctcaaagcgaggttggctctgtcattgtcatcgttttacagatgcagaaactgaagaacagagaacttagatagctcatgcaagatgacaacacagcaggaggtgacagacactttatttcgttaccgtgagataatatttcaaataagtgtatgggaaagaaagttagaaaggggaaaaaatggcagccggaaagataagggagagccaggtgaggtcccaactccaagtacaccatgggaggtcctaagcaagggacatgcagaggggagatctgagcttcccagcaaccaaggcaaaaaagtgtcaatcagtcacactcttcacaagtgcctgccagagactataacccacatactcatgaaagggccagacagccctgacgttaagatctgggagaaattttaggagaggatcctatgcctcagcagttcgtagaagtttcagaggctgtcagaaaacatcccaagtgttagcggtagcctttccctccagcagtggtcagtacttaaagcatttctgttgggtgacagcaaagctgttagcctctctggcctcatggtggggagggactgctgtggagactccacaggaaggagggagccaacagcgctacagggaggctccttctacagttgggagctatttctggtgctctggctgggcatgatggctcacacctataatcctggcactttgggaggccgaggcaggaggatcccttaaggccaggagtttgataccaaaccaggcaacatagtgagacctggtctctacaaaaatatttttaaattagctgggtgtggtggcgtgtgcctataatctcagctacttgggagtctaaggcaggaagatcacttgagcccaggagttcaaggctgtagtgaactgtgatcggaccacggcactccagcctgcgtggcaaagcaagaccctatcgccaaattataataaagaaattctggtgtgcctctgagtcacaccagctgggaacatgctttggcagtaaccaggtgagctgacttgccacgtgggattatttactggaatgcagkcaggcacgcgggaacagctgcagtagcttaactctggttttggaacagctgaccagtgaatggcctgggttttctggcagaaacaggtatctcagttgttttgttttgtttttcagttgtctattaaggttgcttccagtagacgagaatgaaaccccgtcggctgctcttggtagctccttgctactcaaaatgtggtaggaggatgagcagystcggccccacctgggatcttgctggcctctcagctccacccacacctgctgagtcagactctacacttcaaraagatctctgggccatttgttgcagtcaagtttgagacccactggaccagactagtgcctcagagtctcctggagggcttgttgaaacaaagtgctggccccacccccagagtttctgattcagtagatctggggtggggtctgagacgctgcctttcccacaagttcccagttcttagcaaagcagccgctggttcagggacctcaygttgagaacctttgatccagactgcagagggctggctggcaaatcagctgcatgttgggagtcacctgaggaatgttttaaatgctgatgcctgagtttggacctgaggttcaaatgtaagtgatctggaatgtggcctgggatcaggatttttgtaaagcactttgggtgagtccatgtgcagtagattttgagagctgtattctagtggatctgccctgttgctaacccaccagaaggaaccagagcagaacgtgcccttttggaaataactgggaccatgaagagactgtcagtgttacagctcttttagaatttgttaggctgggcgtactggctcacgcctataatcccaacactttgggaggcaaatcccaaggtgggcagatcacctgaggttgggagttcgagaccagcctggctaacatgatgaaaccccgtctctactaaaaatacaaaaattagctgggcgtgttggcacatgcgtgtaatcccagctactcgggaggctgaggcaggagaatcacttgaacctgggaggcagaggttgcagtgagccgagattgtgtcactgcactccagcctgggtgacagagtgagactttgactcaaaaaaaaaaaaaaaaaagcattcatttagcaggttttccagtttttaccagaaatcgccccacccccatcccaccacccaaacaagattttttaaaaagactgtccctgtacaccttgttcctcggggtggttaaggcacaacctctttctatatgagctcagtcaccagggatgcttagaattcctctattcctggccgtaccagatgacagaaggaagcgattggccctggaatgactgggctccaggtccccacctccctcatacagccttggtctgggaagcccaggcttgatgcgtatgcagaaggaaggcagcatacattctagacagaacgatctagtaactatggggctgtcatttggggaggtggatcaatgtccttataaaaaatgctacagactattctctggggcccacaggacgggaccatagacttaataaacaaaatggggacggtgtacagagatccacaagtagaaattttctcaaggtgctttttttttttttttttttgagacggagtcttgctctttcacccaggctggagtgcagtggcgcgatctcggctcactgcaagctccacctcctgggttcacgccattctcctgcctcagcctcccaagtagctgggactacaggcgcctgccaccacgcccggctaatttttttgtatttttagtagagacggggtttcacggtgttagccaggatggtcttgatctcctgacctcatgatctgcctgccttggcctcccaaagtgctgggattacaggcatgagccactgcgcctggcccccaaggtgctttatttagcttgtttttgaaaccagctgtgtaacatgagggtgtggcactaggactgagggaagaaacagcccaaatctataagatatgggtcaagtgaccttgttttataaagtccggaagactcacagtgggttagatgctacaggcacaagtaacagatacccattcagactggcctaaacaataaggaaatccattaagaaatggctcaagaccaggtgtggtagcgcacacctatcgtcccagctactcgggaggttgagttgggaggatcactttgagtttgaggctgcagtgagccatgattgcaccactgcaccccagccttggcaatagagcaagaccttgtcaaaaaaagaaaagaaatggggccaggcgcagtggctcacgcctgtaatcccagcactttgagaggccraggcaggcggatcacctgagattgggagttcaagaccagcctgaccaacatggagaaaccccgtctctactaaaaatacaaaaaaaattagccgggtatggtggcgcatgcctgtaatctcagctacttgggaggctgaggcaggagaatcgcttgaccccaggaggtggaggttgtgatgagccaagattgcaccattgcactccagcctgggcaacaagagcgaaactcggtctcaaaaaaaaaaaaaaaaagaagagaaaagaaatggttcaaagtctaggccctcttcagagctggctgattcagcttgccaacagtgacatcagggtgaggcttcctctgtccacagcattagctgcgaatatcctcatggtcacaagatggctgccagtggccgtcagggtgtgtgcttccttgttcacatccagtggaagagtgacagcctgctccccttagctctctgacaccaatgagaaggtgctaagaacttactagcaggcctttcctcatgacccattcaacaggattgggtcacgtgcctattcctgaaccactaattgggaagggatgggattactcttagaccagtggttctcaactgagcatgagtttgtcttccaggtgacagttggccatgtttggagacatttatggttgtcacaactggggtgatgctactggcatctcatgggtagaggccagggatgctgtcaaacatcctacaatgcacaggacagcctcacaacaaagaattatggccctaagtgccaaggttgagaaagtctgccttagacctgtcagggctgcccccagcctggggtctgtttcccccaaaacacgcacatctcagcggacagggccagaatgcactttgggggccagccacagcccctgccagcctcccagttcccccagatcctaccctgggcttcccctgtaagagctttataatgagatttcaattttataaaattacaaggggcctcttaggagtttttgcctgacatatctttatgaacctaccctgagtgtttgtccctggagagccaggcccaaggataccaatggctagaaccaacagaaaagcacagctgccggcaggaggcctcaccctcccgcagtgtgaggcagagcagcacagtggctcagaacaacagcatgtgctgggtgacctttggcaagttgattcacctctctaaacctcagccttctgagctgctaaatggggctgttgtgattgctggatgaggcgaggcctgcgaagtggctggcatgcagcaggtgctaatgagtgctgcaaaggtgatgtcacgcaggcagcttcccgtggccagagaaacattgcagagaagggataagtagggcttagtgactttgacgggtcaatggaagaatgacccaaagaaggcttcaaggccaggcctgcagttctccaccacaaaggccctcactgatagcacccactcccccacactcagctttggggcctaggtctggtcacccagctagaagccacaggaccctgaggcgtccgagggtgggaaggctgagaggcagctgagactcctggaggccgtgactgggaagccctctctttagaaaggccatcagcttcctgcgtgggggtgactggctcctcccgagagatggcagccaggtctgactgtgcccctctcttacagaccccatgatggagctgacaggcactgacccttcagagctcgacggccagcaggagatggaggacttcgaggagaacgcctacagctatgcgagcgtggacagcagcgccgaggccagtgtcctcactgaacaggccatgaaagagatggcctactacaatgtgctatagcgcaagctgggccacccctaacgggggccgggggcgagggcatgggggtgagacccatgggctgcaggctgcacctcctgcagccgagaaacaagctactgccccactgttctgagccctccctccccgagtcatttgcaccactagggacctttagaccaaatggagactgtactactggccccggctgtgagccagcacaggcccaggcatcccagcaagggaaggagaacacgcgaggcccagatctgggtctccctggcctgcttccgtggggagtgggagaagtggggccactggggacaggtcacaagggcaccggccctcggggtctctccaggcccagcagagctcttcaggggtcctgacactggaagaagagaccacttgagccatgtctttttcacggccaactcctgcctctaaggatgtctgagctcccctctggccagtactgcccacctctaccttgtccagggccccttccccgccctgtcgacggaccgccaggcagggcactctgccttctacctcccggggtctcccatgcgctcctcaagccaggtgtgcacgtggccctggccctggcctgcaggacagctggggggcacccagcccccagaagacccctgtcctacatccctttctggaagtgagtgtccctacagtggattgcaacacatgtcgtccacttcgaccctagctggagtgcctcaccagggggccccactaggaacaaagccaggacaggccccgcgtcaggcacacactaacaaaaccagaagcatggggcagggcagggcggagtgagggcatcacaggggaccaagaagggctgtccttgggggaggcccaggaccacctgtcggggagggggaccgcagtcatttctcattcctcagtgtccaccttgcgacggggatagccacgagtcagcagcttcccggaaagagcaacgtattttaaaaaggaaagtaaagcccacagagggaaatcaagggtttttttgagcaaagggggtcttctgaaggtaacttattatttttttctttccaactgtgtgtcacctatgaccttttctgatggagatgcattttctttttccaagcgtaagcttcctaatgtgctgtgcgtgcttcctacccacccaccccgagcagcctggccgggcaggactggggctccatggggactgtcaccctggccctggaggtgcagccgctggcagcagcctcagcaggctggggtgggaggcaggagaaggcagagctgggaagccctccacccctgcctggctcctgcagtcgctgacttgctctgtcccatgtcccatcctcggctgtcagggctgctgactctgctcagccaacagctagctccctcgctcgcctgctctcttcccctctgttcccacgccagctcctgcccctggaaccagagatgacaggcccagggcagtgaatagcacattcaggaactctagggcacccggacccccccacccacttgcctcctgaggcctcagtggggaggggcaagcaggggtcttccccaaaggcacagatgaagccactagcttcagcctagaaacccggagaagggaacagcctgcggtgggaggaaccaatctgcagcgcagccacccccaaggctggatccttaagtgaaggaccaagccaggcctcagggtgactgtgatcaggactgaggggtggacaaggtggcccaagtatggcttccagaccccgaagccccacgacctcccaggtgcccgccatgatgaccctcaggtggcagtgaccccgtcactgtataagacattttctcctgctgagcagaaggcatcatcccctgcaactacctcttcccacgtctttctcccctggtaccaaaaagaaccctgtacctctcctcctcctcctccctcctgccagtgcagtggccttggtcttggaaactgaagggagaaggtctggcccccagggtggggctctcctttccctcccccagccccgccgtcagcactggccctctgtgaggttcgatacttgaacgccccctgccctgtgccttggacctgggcaaagctaggaggaggaaacagcacaactcacagtttgagctggggggtggtcttggcaaggctcctgtctgtacccctccctaaccttctcaaaagaggtgcacagcctctcgggtgacttggaaactcctggacaaattccattctaacttattttgacatgtatacaaaccaactgtttagagattccacttgtgcaaagccctactgtgtttttatgttcctgtttaaaagagaagtttacttagcaataattataaataaatgaatattctttagtgaggtgactgcaaatgcttctttccccagctcttggggacctggccctcactcccagcaggaactcccagcaaaacttcccagccccacacagcagggctgcactctcccagggcccgggggaggctgagaccatcctctgcactggaatggccccctgcagggccaggcgcctatagccagctgccccgggcccaagagagtggtgtgggccacggcccctgtattcccaccacttgcagagaaaagctgcttcccctccctacccacccacatggcttcaggaaagaagccagctcccgatgccaggctgggcttcagaggctgcgttctgcagagctgccagccccgtgctggtgacaggcaagaagaggcaggaagccttgagcttcctcccaggggctgggcctgctagagccagcagtccacgtttcttcttatagccctgagagtttcagggcattactcaggaaaagcaagcggggggtcaccagtgtggatggagggctagagcccttccaaagccactcagtctaccgcaatggtcgggtttcaggagccataggagtccccccagtatttaggaaagggactttgtaagatggggttttgagagatggggtctcactctgttactcaggctggagtacagtggtgcagtcatagctcactacagcctcaaactcccgggctcaagtgatcctcccaccttggcctcccaaagtgctgggactataggcatgagccaccacacctggccaggactttataaagattatacaactcttctccaggacattttaacaccaaaaagaagaagctttgcagaacttactatgcagaggacagtccttttgattatatgtagctttagagcaacttttatttttcctttttacatggggctaaaaaacttgcatagagcaattttttttttttttttttttttttttttttttgagacagagtcttgctctgtcacccaggctggagtgcagtggtgcagtctcggctcactgcaacctctgcctcccaggttcaagccattttcctgcctcagcctcccgagtagctgggactgcaggtgcgcatcaccacgcctggctaatttttgtattttgagtagagatggggtttcaccatgttggccaggctggtctcgaactcctggcctcaagtgatccacccacctcagcctcccaaagtacagggattataggcgtgcgccactgtgcccggccgagaacaatttgtcacaagcttacttttctagttttgccaatgcatggtgaaagtgaacccaagcctgggaactgcaggcctagacaatgcagggcccttgttcacacacacccaagcccctccaaactcaggcagccttggaaaggagaagtgtgaggcaggtgtgggtaggacctctttttagtacctagaaaaaggctaagaaagtggcctggagatgtttagaaggttaaaaccaacgaagaaaaaaatcaatgacaacctatcaggaactgattgactctcagaatggagaactggacacagaaactggatcatgctagaaaattccagggaacccacaggcctgtgccctgagtgtccgagaactccgcagtgggcccctgtggaatgcgggctcccagggctgcctggtcccttccctgccgtggcagccccttcctgaggtgctctggtctgccccaggggaacctgccagctctagcagggcctctgcctcagggtcccactacctcctcccctcagggacaaacacagcagacaattttgtgaagagctttttagtagctaaatatggcaccatgtgttccaagggcaatataaattacagtatgcaaaacatactgactggctgaggtaaaacgcactgctcctgcctcacgtcaccatgaggggaaacacacatatgcttttaaaaacatctggcttataaaaaaacatcccctagaaaggcctccagagaggggctgtgaggctcaccctctgccgcgctcaggaggacccgccggctcagccctggcccctccactgcagccatgggtggcgcctccccctactgcctgcccagggctctgtccaggttgctcttgatggtgtcgaggaagtccgtggtgttcaggaagtgctcgttcagcttcacactgcagagagagcaccactcacatcaggggtggctccaggccttgccaaggccatca

SEQ ID NO: 97382 - DNA, 14523 bp, Homo sapiens
tagtcacatgacacaatcacctcatgatgcattgctcagaagaaatcatgcgacacatgactgtgtttctcattcctagaaaggaggcacatgacgagatgattatatcatacagcctaggtgtgttgtaggctataccatctaggtttgtgtaagtacactgtgatgttcacacaacaaaatcgcctaatgctgcgttgctcaaaaggaatctggcacatgactgtatttctcattcctagaaaggaggcacatgacaaaatgattcctttcttttggaagaaaggacaagatagcgaggcaggaaattttccctgactctttcatgggtgggaactggagtgcacaggcgctagaactagccagctgcttcagtgccagaaggggcagactccactcactctgtcccactgtgtcccaccccttgcaggaaggtgagtacaggtgagtgggtgcaggagccgggtgagtgcttttgggcactggcagaagcaaaactccatgtggcctcatggcatcatctagggggctgcctatgacccctgaagccccagaaagagggttacagtccatgctcttttagctttactgtctgtagatggcttaaatgttaacagctcagtggagggtcagcgtgacagccttttgcacctgcacccaaattcttgtccagcgtccaggaggaatgaggttgcatgaaaattggagagggtaaatgcaggggattttattgccgatgaaagcgtctctcagcgggaaggggagctgaaaaggcgacagaatgggaagataatcttcccccggagtccagctgtccctggcctggctgggctcctttctgaagcaacactgtcaagctgtccctctgaagtcaagctgcttctctccaacatccaactgtagtatttgacggccagctgctgctcctcttctcctctctctacttgcaggggctggggtttttgtgggcacaggattggggtagggcgggccatggatagttttggaaaaggcaacattcgagcaggaaaatgggaatgcatgttctcattttgggctgtggttccacgcttaagagtggggccctcgctggggacccatcctcttctgctcagaattttcctgcctcctgtccctatcattatgatgggatatgattcctggaactcctttctcgtggccatgaatggagccagctcttgagggtaaagtgagcacactacagatagcagacaagagcaaagaacattatagagtcactgcatcaaataacttgtatactgcactattgctgggctctgtttttggtggcagaataaatttccttatttttttttcaaaaaagcctatcaccttgtgagatatgcttatattcacttcacagctgagaaaattggcatagagatactaattgcataacttgtaatacacaatgttggcaaagatgtgggaaaattgttggtgggattattgattcaggaattccacttccaggtatttgttctaattacataagtgtagctttggtcataaattttatataagattttttgtgacatttaaaatagcaaaaagcaaatctaaatgtccgacgatagacaacatgttgaattaaagccattgaaatatgcagaattgtgtttattggcatagatgcttatgatatattgttaattgaaaaagcaggtaacaaattaatatacagtattatgttaattatgtaaaaaaagtatacatattcatagaaaaagtttggaacaatctcagatatcatctgtaggctatttctgtttgaaaataaccaaatagatttttgggttgactcaacaaattatggttgagtcagtcttactttcctattttataaatgttttttacatcattgggtatttaatcattttaaaaatctactcaggcatcatttgtataatagtaataataatttaatcccccttatttctcatgtctcatgccttatccatcatccctcatatcctactcttagcccagattttccttgacagctttattttcttggagggcaggtatggggaaccaaatttgtttccttaccctagctctagccatttccacaaaagcttttatagataatgtccattttgcttattatttttagtttaaccaatacttaatatgtgcccacagctcactacctaggccctgatttaggcattaggaataaaaactatctcgacttagttaaaaccaccagatgcattgcttgaaaacctgttctgccacttaatagctgtgtgatttgagcaggttacttaacctctccatttgaaagcaaacatttattgggctcctgttacacattaggactggagatacagtattaaaacaagtacctgttcatgaaacttacattctaatgggaaaagatcattgattaatatacaacaggtagtgataagtgctatgaaaataatgcacttataaaaagaataaagaatgacagcagatggggtatgaatgtgggggcatatggcctattttagaaagcatagtcagggaatgtgtctctcatcagatgatatttgaggagagacctgcaggaagtgagccagccagccatgaggttgtgtatggacaagagttgcaggaagaggcagtggtgtgctggtgctggcttgcatttgttctgatggcatgcatctcttcccaaactctgtattcagtgaaggcaaattagtggctcaaaaatagccttgatgagagtatttacacatagatacctgcaaatgctacaaatgagggttttctcccccgtcccggagaactatttgttaaatattttaccagcacacccctgggaagaggaagaataaggacagaggccctgaggcaggagcaggcttgttctgttgaggaagtcaaggcagtcaggatggtggaacagaatgagagggaaattgacaggagatgaggtcagaggtagctaggagcaagatcagtaggccaggtaaatacgttggactttggtctacgtgaaatgggggccattgaaaggttttaaacagacgagtgaagtgacactgtctgacttaagctttgaacaggaccgcagaagagaggaatccagaagaccagttgggagacttgagcaaaattgtaggaaagaggtaacaggccaggtgcagtggttcatgcctgtaatcccagcactttgggaggcggaggcaggtggatcacttgaggtcaggagttcaagaccagcctggccaacatggcgaaaccccatctctacttagccaggtgtagtggcacacacctgtaatcccagctacttggaaggctaaggcatgacaatcgcttgaacccaagaggcagaggttgcagtgagccaagattgcaccactgcactgcagcctgggcaacaagagcaaaactctgtctcaaaaaaaaaaaaaagtaataatggcttaggggtagaggtagtaagaaaagcacgttgatttcttcatttttttcagagattgtgaagattaaataacatttaaaacatgcttagcctaaggtctttcatacaggaggcccttaataaatggtagctgtcatatcgtattattattgacagaaggcccatactggagttggggagggttgttcatatctaattaagaaggcaagtaattttagtacaagtggtaagtgctatgtttgaaacaagtgggaacgctgaggagaaacacttagcccagctagggtaggaaggtccaggaagggtgttagagcaaaagggacagctttagcaaaggcatggggatggggaattagaaggaaagtggaactgcttaaagtgtccacacctcccgattcaggtgataataagatcacagcttcatccttagcattattagcaaaataatccgtgatctaaagcaacagcgatgattttattactctatgtgttaagtaaatcacctagcaggctggggagggtgatgttccaattccagttcacttggtaactttatgtattacacagagcctttgattctgatcagccagatctaaaaatgtaagctggtaagaaatgtttaaaacttgctatggagaaaggagttcttaatctggggcccaagcatggcctttgggaggtctgtgaaccctttgaagatacttgcagaattgtgtgtgtgcacatgaattttgggggtagaagcgggacacagggagtgttcatagcttttatcagattcccaaagagttttgcagcccagagaatatttaaaacactgctactgagatgaatattagagggtaaagtaaaatcagtctagaaggacaggcatgtttttgtctgccattccatctatcattaaaataatttgattaaatcatattctaaatcacatgaaatcagttaaaacatttcacttaaaagtgattacttataaaaaggcttttgtcacttttattcaaatatgaactgtcattttgggcccagtgaatattcattccaacttaaaatttcagctgtgccaaactctgggatggtaaatgagctatagtataatcaaaagtgcttccaggccaaattcgctctgtttatcatgctgggatcaaacctcctattcttccttttgaaaatgttctctgactctgattttgttgtttagtttttattgattccctacaatcccctcatgttattctgccaagtctccaaaatgacaaatattccctaaggcttcttcaaagccaaagaaaaaggaatgtttactgaaattttatttttaaaggaggattaatagaatttaactttctggctatcttttggagactcatgtgattcagaaatttgccgccttctagtcacacatagatggtgaaaatttactcacctgactacttctgtctgccaatgggaaatgggctgttaatagtttccatttcttcaatgctatggtccaaacgccttgttaagtgcattatgtatattatctcactgaatccttgcaacacctactgagatagagatttgattttcattttatagatactcaacctaggctctgagatattagattactatcttgcccaagatcacacagccagtgaacagcagaaccaataggtagaaaaatggaaagtaagatgtcccatgaaggacgagcgagctgcccaaagaaaagcaccccttttccttgtactattgccatttttcattgtgtggcatttttcagtgctgctgtatcaggcattgtgtcagaacaatggatgagaaaaatatctaggaattgatgattgaaaagggttgtgggaaatgaattcatctagttaattaaactatctcaatatcttttaagaatggtgacggaggaaatcagagttaaatttgagtacttaccatgagcaaagcattaatgtgaggtgctttacttacattactgcaatgaattctcctattaagggtcctgaggaaggcatttactatccctgttttacacatagggaagcagaggctcagaggagttgcgagagtttcccaaagttacatagataggaagatggtatgatacgaccaggatcagccttctactatatcatatgtaaaatttgcttcaaaagctatttactaaaatttaaactatgtgggggccagccatcatatcattaaattctctatactcctcagaacataatatagtacctggtacctagtaggtactcaagataatgtttctaggttgatcacccatcacagtgggttaaaaaatggaatatcaaaggcacaaagatgtatcttatttccaaatactaaaaaagaactaccttcacattccttacaggttatactgttccttagaagacttatagaaaatctttttaataaccccctatgtatagttcagaggttaaaaacctgtacatattatacaaagtttccaataaatgcaccttgtgtattataactgcatggtactgacatcttcaagatgggaaccatgaatagatttgtctaggtaggggagaaacagcttggtattttagaaatacgtatgatatacaacatagtcaaaatgcaacaactccaaatcactggaaggtgtattagaaaatactcaggcacatgtgtaaatgctttaacatggcctggccctcttcatggtccatctgtgtattttttggtttgtggctgacacctcctgcctcaacacacccaatcttcttaagtgtgtccagagttgtaaagggctgtctgtcaaggctttcctgatgatggtgttgctctaatattccagtgtcaccgtcttggttttgagatattcatttagagcttcctcacctagggaagagaaaagcagttgacagaccacattcaraggcagacatgtgatgtcttcagaccttcagacataggtatacgtaggtgtccaggtcactaagtaaatagaatgtggcctaagccagtgcttctcacactttgaagttcatactaaccatstgaagactctgttaagttgcagatcctgatctgattaagtctggtgtgggcccagaggttttgtgttgctaaccattccctgatgatgctgatgctagtggtccatggaccacactttgaatagtaacagcccagaccagctaccaggccttctaaggagcagagagtgttgcctggtcagcttcaaaccaaaacccttctcttttatttccctacttgatgacagactctgcctttttgtccatttaaactaaacagaagtaaccaggatactgtcctctggattatattaattaaagcagaactgagcacaggaaagtttgaaatcatttggtttaaccttattttaaagataaggaaaattcagtttatattgtttgttagaaacacagggaaacctgtctaggcaaaaataaataggtctgcctttctttgactgtttctattttgagccagtactgtcatcaatctctacagaggttaaagggcactgaataccatgggaaaactaatgagtgcgtgattctggaagctgagctaaaacaagggctgtcaactttgtcygcatgttagaatcactcagggagcttttaagactcctgaccccacatcacaccccagatcaattagatcagtatctgtattttttgaagctcccaggtgatttgaatccactgtgcagctaaggttgacaaccactgggctaaggggttttaaaattgggggaggaagaaactattagaaaaactgtagtattttatagtaaaacagacctggagctggtcaaatacactctctcaaaagatgggtgaaacagggatgcctcactttctaataataaattccctaagaaagtctcctacagtgatttggattcaggcatgaaaaccagattaaagacatggaaaagttgggggggaagcccttaccttcacccaatggaatttaaaatgagagctacttttactgctgcaaatacatggccaaagtcattagtaaagagaaaatgtaaaaacaaaacaaaacaaaaaaactccaaatgaactaaacttatatttgcagactgtaatttcagtaaatcacaaacatttcagtttttgaaacaacgtaccagactgaggggaataagagatgtgctccacagccagaccgcctgcctttgaattctctcttgccagtgcctggctctgtgacttgaggcaactcacccagcctctctgagccccattgtcctcttctgtataataagataataatagtacctattcctctgagctcgtgtgagaattgcctttgcttatacaggctaagtagaatggggcctggcatgtgtttcgcactgaaagtaagctattgcttgaaaggtgttagtgtcactgctcacagtgaattacattttgggctttttacaaactcttaagtctcattgctcagactcccaaaaaccctgccaattgcagggttttttcagtgttgactctgaaagcctgccaagaagctccaggacaggatttattcttggagctcgctggttattgctctccacccatttgcctctcttggttccatttagtctcgtgacagctaacccaagttcatgccgaatgtcagattaaacaccaaacatatttcagctaaagtatattgttgcaatttctttttcctttcaaacattaatcttttttgaaaagaaatatctttccacacaatgtgtgtacttttctgtatgtatggtatattcaatagaaatgtttaatattttaaaaaacgaatgcccttctaaacccagatataactgccatgtaggaaatgcccctcaaagtcacacacaagtcatgaaacatagagcagatttttctgtgatgtgacaacaaagggaaggtgaagcagaaaagtaaagccatacctaagtcttttccaaagccagattgtttaactccgccaaatggggccgccacatctgtcttgttgtatgtgttaataaaaacagttcctgcttccagtttttcactcacatacatagctttgtttatgtctcttgtaaaaacccctgaggccaaaccatactctgtactatttgctcgctgcaacactccatcgatgtccctgtgtttttaggaagacataaaacttcattaaatgtaaagcaaaagactcattttatgttctgaaaattttcccatctatgctagaaacaggaaaacattactgccatctgcttaaatgtttttgttgttgttgttttttagaggccaggcattgctctgtcacctaggctgcagtgcagtggcacaatcatagctcactgcagcctccatctccttggactcaagtgatcctcccacctcagcctcccaagtagcggggactacaggcatgtgccaccatgctcagctaatttttaaaaaaatttttttgtagagatagcatctccctgtgttgcccaggctgatctcaaactcctggcctcaaactatcccccaaccttgcccttgcaaagtgttgggattacaggtgtgagccactgcgcccagcctgattaaatttttataaatgaaaatatcaggctcacaccaaaagaaagtcccaaaaaaatattactagtattacatttttcatatatatcatgcaacacctttcaaaatctgacccaaagtcatatattcaatcttcttcaatggttctcattcatgatctcccactccctcccctctcccatgactcccacttctagatggattttcagagtgtcctccctatttccttccatctcttccgattttgcacataaggttcaagcctccttcagtgcctgaagccgtttcagatcccaccagtgccattgtcgaggtgggagagtagggtggttctgtgagagggctctgcagccagactgcctggtgaccttgggtaaatgactccatctcccctcgccttcatttattattgcgaaccatggaaataataataaaaggacctgtctagttgtcatgaggatgaaatgaacaaatcatgcctggaacacaataaatgttcaataaaagccagctatcatcaggtagcacatatttttccaaacttaatattttggtagaaccaactatatagtgctgacttaactcttcctgtaggtaatggttcaccctccataaattggaagataaaagttccccgagggcagggataactttatgtctcatatacctctttatgctatggtgttgcatcgtcaaatgcgagtgaatgggattacatgtgcttattcaacaaaataggtcccgtgatttccctgccttttgacttagtttgtatacacatccaagcaggtgaagacatgaacctactcttttctcagttgagtcgagttctaatgtgcctgtcatagtgtatgtaccttcttctagtgtgatcctaatgcttaaaaacgcacacattttctaccacatggccagcaaatacaagccaggttgttgttgttgtttttctttttgagatggagtctcactctgtcgcccaggctggagggcagtggtgcgatctcggctcactgcaaccttcgcctcccaggttcaagcaattctcctgcctcagcctcctgagtagctgagattacaggtacatgccaccacacccagataatttttgtatttttagtagagattttgtatttcaccatgttggccaggctggtcttgaactcctgacctcaagtgatccgcctgccttggccttccaaagtgctgggattacaggcatgagccattgcgcctggccaagccaggtatttcatctggtgctccagcaaagacacaggatctgttccaaaactggaggaaaaattcgagtgctgaatttattgagacagtacaggtttcagtgtagtgccttatgaaggaattttcaaaggcatcttgactatccaaaattttaaacttgcacaagaaatctggaatctaacctggagtgaacttggactctgctaaaactctcacacttcttgatgcattgcatatggtagggacccaaatatttatagaatggactagagggagaaagatggttttatgccatttctcgttgaggactatcaagatatcaccatagctccatagcacattgtttatgtctacagcaatgacaagcatatattgatggcagcagcaacagcaaatacttgacttagtaatactcagaatgacctaaggaggtacacattgttaccaaaccatactctattatttgctcactgcaatgctctattgatgtccctatgtttttaggaagacataaaacttcattaaatgtaaagcaaaagattcattttatgttctgaaaattttcccgtctatgctagaaacgggaaaacattactgccatctgcttaaatttttttttttttttttttagaggccaggcattgctctgtcgcctaggctgcagtgcagtggcacaatcatagctcactgcagcctccatctccttgggctcaagtgatcctcccaccttagcctccgaagtagctgggactacaggcacatgccaccatgcccagctaatttttaaaaaaaatttttgtagagacagggtctttgttgcccaggctgatctcaaactcctggcctcaagctgtcccccgaccttggccttgcaaagtgttgggattacaggcatgaggtgcagagtggttaagtaactggcccaagctcagagggttagtgaggggagaggaggcagagttggtcctctgacccactgcaccatcctgcctctgaccctctgtggactaactgtcatctctgtctgtctcccctgttagataataaactccttaaggtcaggggctgtgacttacccatgttacagtagattccctcaaacctgacttctaatgtctgcacatttaacaccaccaccatgggagaatgtataatgagaaatggcatagcatgcatccttgaatggatatatcaaaggttactcactacaccttatagtcccctgaagtcttttatactatatctattaaagaccgagaaagtctattctttatttttttttcaagttctcattggctgaaataaatctaaagccattctgaagaattttgtgcagtataccatgagaccccattctattaagtattgttttatgagctcagttagcacttggacctcttcgataagctgaactctttgcaaagtttcatgtagtatcacaagccagcatgtcatttacagttgattatatgatgattatgaacatttccatgaaaagttgagtatcaagctttggggggcaatatcccctataataacagcactctttctctagggaaataagatttcacagatgcataccctaggaatttaaatgtgaaaaccagttttgttatttctcagttatttactttgttccacagacatctcaaatgtcaagtgcagaaaaactaaaatttattcagctaaaagcccattatgttggccattaattgaagctgaaaagcaaaaatatactatgatctacgatggttagcaaaagcgtaacttctaattatttaagttaattattcttatggtagaaaattacatgttcattaatcttatgctgtgtatatagcacagtggcaaaggggaaaaatgacttatctagtcaaaacctaagttacattgtgtctgaagaacctacccattttggaatttagaaatgaccataataggcccaaaggattcctctttggcgaggtacatgtagtcttccacatctgtgaacacggtcggctccatgaaaaagcctttttggaaaaaacaaagaaaaaatgtcaactgtaggttaagtcattttcaattaatagtcctctcacttaattacattataattttttctttccctctggcccagtaaaaccaagaagagttgcatttctctatttggtgttggcatgcccaggttcttattttttaatgtctttattatgaaaatgtcaaacctatgtaaaggtagagaaaacagtataatgaatggtaaaataaatatccatattttgctgtatttatcttttcctcattgaaatattttaaagcaaattccagatatcataattttaacacctcagtatttcagtacacatctgtaaaaaataaggatattttcttatataaccactatacagtgtcatgcttaacaaaattagtaagtattctttattcagagtttatattttaatttccttaatgtctagaaattagctttttcacagttggtttgtttgatttaggattcaaattcttctacacattgtatttggtgtttagatttcttaaggatcttttactctaaaacatttccccattttgtcttccccttattttttatgctatcgtcatgttaaagagactgggtcagttgtttatacattatctttctttctggttaatcattgcttcctttggatgatatttgtttctctatctcttgtatttcttctttttcccagtgacttttattgtggtaaaatacacataactgaaatttaccatcacaaccatctttaagtgtacagctcagtgttatgagattcataatatgcaaccttcaccaccatccattttcattaactattttcagcttataaaactgaaactctatacccactaaaaaataacttcctgttccttcctccctccctactgcagttcttatgaatagaaagcttggcttaaaggtataattagattcagcttaagcttttttggcaggaacacttcataggtgatactgtgtattacacgttttattccatcaggagacacatattatccagttgtctccccttctttgttttattttgttttgttttgtttgagacagagtctcagtctgttgcccaagttggagtgcagtggcttgatctcagctcactgcagcctcctccgctcacgttaacctgcctcctaggttaaagtgattcttgtgcctcagcctccccagtagcaggtgcgtgccaccacactgggctaatttttggtagagatgaagtttcaccatgttggccaggctggtcttaaactgtcgctgtccattccaactgaagaaggcgggcacccggtaaacccccacagaggtgatcttacctggcctttggacttgtcttcccccgtacaccaaagtggccccttctttcactccagtttcacagtattgcagcagcttttccagatgagccttatgattttggggcccatgatcagtggatctgtcaagtggatcaccaattttcatctttttaatttcttctacctgtatgttacccagtccataaaaacacaattcactgttaataataatggagtttctaccaagtggtaggtgttatactaaggtgtttatagatgtattgtcatttagtctttacaatagcaccggaggtaggtggttggtttttttttttttttcctttttggagacagggtcttagtcactctgtcgtccatgctggatcacagtggcatggcatggctcactgcaacctcgaacttctttttttttttttttttttttgaggtggagtcttattttgttgcccaggctggagtacaatggtgtgatcttggctcactgcaacctctgcctcccgggttcaagctgttctcatgtctcagcctcctgagtagctgggattacaggcgcctgccactgcgtccggctattctcatgtcttagcctcccaagtagctgggattacaggtgtctgccaccacgctcggctaatttttgtatttttagtagagatggggtttctccatgttggtcaggttggtctcgaactcctgacctcaggcaatccacccgcatcagcctcccaaagtgctgggattacaggcgtgagccaccgcgcccagctgcaacctcgaacttctaagctcaagtgatcctcccgcctcagcttctcagaagaagaaactgaggcctagaggggttaagtaagtgcacccaaccactaaatactgtagacttttttccacttgaaatcccaagtccttaaccactat

SEQ ID NO: 97383 - DNA, 18485 bp, Homo sapiens
gttttttatttgtatgcagtacttcatttttaatcttagaattgcttgaacagactcattaaggatttaagacacaattctttccctcaaggagcttgcagcttggccaaaatggtagtcacccttagttcgtttaaaaaatacatgagcatgttagtgttagctatgcagactccatgatttgggcactgacgtaagaactgtgataaggtaacttgttaaagtctttgaatgtcatctttgaggaggtgagactttgtttctccactacttaaagtttttgagcttggtaagagccatgttattcaggcctagaattcatataacaaaattggccctttctttgtagtcctttatgagtggatgaaagaagtcattgccagtctgttttttcgggctccaccacattgtctttcacttacgctaatacgcatgacctgagtaactaaggcttctggtttattcccaatgtgtagtcttattgtccaagtagcctccaggggaagatgagtgctaagatatagtatctctgtataaggttgattttttggtttatttgttgttgttgttgttttcacatcagaaggaactttaaacctttgcatttgcccctgactttcattttccaaggtgaagccaaataaacactaatgtgttggtcctttgagcagtagtgaaaatccaagtgacctaagcataatcctctatagtatataacacaattaggctctcaaagcccttgtctaggatcattcactatgcctgtgactgttcccccagtataaggacttggcctggtgagaataaaaaggcacagatgagttcagcggcagattatagttgaacaactaactgccccgtctcttttctcttttataatgactacttatatgtgttaagtgtatacgtccacttagcactgaacaatgctttcagtgaacaagtaaaaacaatcattgccttatttggaccatgtaaatttaaatgtctattagtttagatgtcactcaatgtgctgtaactttaaaggaagatctgtttctttaacacaggtgaaatactttggacgtgacccagccgatggaagaatgaggctttctcgaaaagtgcttcagtcgccagctacaaccgtggtcagaactttgaatgacagaagtagtattgtaatgggagaacctatttcacagtcatcatctaattctcagtgatttttttttttaaagagaattctagaattctattttgtctagggtgatgtgctgtagagcaacattttagtagtatcttccattgtgtagatttctatataatataaatacattttaattatttgtactaaaatgctcatttacatgtgccatttttttaattcgagtaacccatatttgtttaattgtatttacattataaatcaagaaatatttattattaaaagtaagtcatttatacatcttagaaaaaattacagttttgtttttacaattctgaaatatatgaaaaacttagaatatgtcatatgttattataacagatctcttcctacatcttatttttcttctttgtatacagtagtgacagtttaccttcagtcatcctacaggtcacctctgtgcccaacaactttacttgcctacaacggttcacaaactggaacaggccatattcaaagccagtgcctatttcttcagaactgttaacagatatagtgagttgagggagctaatctgatacacttttgataatataatgcctttcaaattagttaccaaatcataaacagagtggaataaatataaatgagattctaactaggatgaatgtggtagtaatgatgtatatttttcaaatttacctaaacagaaagattattggctaaggcaggcggatcatgagatcaggagatcgagaccatcctggctaacacggtgaaaccccgtctctactaaaagtgcaaaaattagccgggcgtggtggcgcatgcctgtaatcctagctactcaggaggctgaggcagaagaatcacttcaacccaggaggtggaggttgtagtgagccgagattgcgccattgcactccagctcaggcaacaagagcaaaactccgtctcaaaaaaaaaaaaaaattgtttacttgtcaaattgaactaggtcaatttgaatatgtgtattgctctaatgtatggaagttcttagtataagagctgaaggatcatgactttcggttaatagatgtttgaaatagatgtttagaggttactgatacacatgtcaagttgttcattcccatcatttaaaatatcaccttataattccacagaaaagtaaatggtatgtggacgtcataatttagaatgtgtaatcttttttaaaatcttataaaaatacactggactcagtggtacgtgcctgtagtcccagctacttggaaggctgaagtgggaaggtcactagagcccagaagttcgacactgtagtgtgcaacaatcatacctgtgaatagctactgtactccagcctgggcaacatagcaggactcttatctctaaaaaaaattttaaatcttataaaaatgtaggtatatctggccaggcatggtggctcacacctgtaatcccaacactttgggaggtcaaggcgggtagatcacctgaggtcaggagttcgagaccagcctggccaacatggtgaaaccccatctctactaaaaatacaaaaattagctgggtgtggtggcgggcgcctgtaatcccagctactcaggaggctgaggcaggagaatctcttgaacctgggaggcagaggtggcagtgagctgagatcgcaccactgcactccagcctgggcaaaaagagtaaaactccatctcaaaaaaaaaaatggtgggcacagaagctcatgcctgtaattccagcactttgggaggccgaggcgggtggattacatgaggtcaggaattcaagaccagcctggccaacacggtaaaaccccatctctactaaaaatacaaaaattagctgggcatggtggcaggcacctgtaatcctagctactcgggaggctgaggcaggagaatcacttgagcctgggaaatggaggttgcagtgagccgagattgcgccattgcactccagcctgggcgacagagcaagactccgtctccagaaaaaaaaaaaaaaaaggtaaattcatgactcagggttaactagttcataaaatattacaaatttatctggctaaaccaaagatttttaagtcaataaacattgattatatatctattgtgtgtaaaatagcatgttaggcaatgttgatatacttctgaaatattaaagattaattgaaaatgaaagattaaatttatttgctttctacacttgatatcgactattatttaataacagtaacaaaagtttttattctcacttctgctttctaagacataattcttattttaagatatcatccttaatggtagaatttcaaaattgcaatttgtgtttttcttaaattttctgttttctttttcaaaggaactcccaactcctaataatatggaaaatgaagccagttcttaaacaaactccagaaacctgaactgacacaaagtacaaatacagcttactaactgcaaaccaccaaaagaacaccatttctgcttaaaccaagagcctacactttatgtctgaacttttcttatttttgtcttcatttaaatgttggtagttttccctactttccaatgaagtttttctttttctttctttctttctttcttttcttttttttttttttttttttgagacagaatctcactctgttgccaggctggagtgcggcggcgcaatgttggctcactgcaacctccacttcccaggttcaagcaactctccttcctcagcctccctagtagctgggattacaggtgccctacacccggctaatttttgtatttttattttattttttcttatttttttgagatggcatcttgctctgtcgcccaggctggggtgcagtggtgcattctcagctcactgcaagctccgcctcccgggttcacaccattctcctgactcagcctccccagtagctgggactacaggcacctgccaatatgcccggctaattttttttttgtattttttagtagagacggggattcaccatgttagccaggatggtctcatctcctgaccttgtgatctgcccacctcggcctcccaaagtgctgggattacaagcatgagccgctgcgcctggccccaatgaagtttttctatgacggctatattatatgctggaaacactaatttatagtgactcagatcaaactgaatgccatctttggtggttagctcaatacaagtacttaaaagtaagactttttttcccatgacttttgttttgatacaggaacacacatactccataagttactgttctatcacagtacagtttttatataatcattttttcttctattacagaatatcttacattcttggatctaaaatgaaaacatgaatatctttcttagttcagttcagccaagcatagcattcttttattcatcatttaacatgtgccaggcattataaggtatgcaggggatgtgtcagtaaataaaagacctaagttaggccgggcacggtggctcacacttgtaatcccagcacttagggaggctgaggcgggtggatcacctgaggtcaggagtttgagaacagcctggccaacatggagaaaccccgtctctactagaaatacaaaaattagccaagcgtggtggcacatgcctgtagttctagctactcgggaggctgaggcaggagaatcacttgaacccgggaggcagaggttacagtgagccgagatcgtgccactgtactccagcctgggcaacagagcaagactccatctcaaaataacaaaaacagacaaaacagctaaagttccaatgctcatattctagagtttggaaattgatagcaaattacgatacagcaggtccttgaataacttttttttcaacatcatttgcattaaaatgttgttgagaaggaaacaaaacattgattcctggccaggcttaccgtctgtgtggagtctgcactttttcccacgtctgcaggagtatattagtccattcttgcattgctataaagaaatacctgaggttggatgcggtggctcatgcttgtaatcccaacactttgggaggctgaggcaggtggatcacctgaggtcaggagttcgagaccagcctggccaacatggtgaaaccccgtctctactgaaaaaaaaatacaaacgttagccggccatagtggtgcacgcctgtaatcccagctactcagttggctgaggcaggagaatcgcttgaacctgggaggcagaggttgcagtgagccgagatcatgccactgcactccagcctgggtgacacagggagactccatctcaaaaaagaaagaagaaatacctgagtctggataatttattttattttgtttgttgtttgttttgaggcagagttttgctcttgttgcccagtctgagtgagtgtggatgtgtgtgtgagtgcaccctgcaatgtgatggctgtcctgtctagtatcacttcccacctggcaccctgaactgccaggatgggctccaaccacccaaaaccctgaactgttgtaatttgataaatcatcttgttttattcatctttcttgaatgttgtctagctcacatttacttcagtgtttaacatcagaaatgttttggtctttatttgcaagtttggtaattttttttttttaccagaaatgtgccataggatcttaactcttgtttatatcaattagcctgtggtaaatttggtttcattttatgtagtttatcttagagttacagtttgcaagaacctatcgaagacattaagtaagaacttaactgtacaacatgtcaggtagtggtaggtaccttaaagaaaaacaactagataaagagatagagtgataaaagttactatttaatatgaaatgatccagaatgtcttctctgagtagataacatttcagcacagacttaaatgaagcagaggaaaaagatatgcagctatttgggaaagaattctagatagagggactaacaacttcattttcacttggcattgcgttgaattgtttacaagatacaacagccaacagcctttcaatttataacccagtttcacatagtcttactccttaatcttgtgcttgttcttcaccgaaattagaaagcaaagtagcaaagtttattaacgaatatgaaacaagggatggccaatacaatatgatattttttttttttttctttttttgagacggagtctcactgtgtcgcccaggctgtagcacagtggcgtgatctcagctcactgcaacctccacctccctgcaacctccacctcccgggtccaagctattctcctgcctcagcctcccgagtagctgggactacaggcgcccgccactacacccagctaagttttgtatttttagtagagacggggttacaccatattggccaggctggtctcgaactcatgacatcaagtgatccgcccacctcagcctcccaaagtgttgggcttacaggtgtgagccactgcgcctggcctaagatgatattttcaaagcatttaatcaggcaagaatatcttggttacttacaaggaatgggtagacactggaatcatgtgacaagtttatcaggcttttgcaaaattccagactcatgagagttgagactagagtggtagacagtggaaatgaaaagagagttgttttagttaaagattcttgctaaagcaaagagggaaaatgatcatgggaccgtgagtttattttatggaagccaagtcacaccctgtggaagactggaatgaggactaacaagccattaagaactagggcagttcatctctgcttaattatggagtctcatggcctctcttttgtgcttctttccacacaactgcttttttaaatgtttatttatttgttcgtttttattctctgcaaacctgttttctcagcatagggcaaaggatggctgtcccacaggacgttacctgtcctttataggtttgtgttcttttggaggaaatgacaagctcagcttgggaaaggtgttaaacctgactgagattgccagataaaataatgatgccaaattaaattggaattacagataaacagatgttcagtgtaggtcccatgtaacactaaaagattattccttgtttatctgaagttcaaataatttaactgaatgtcctatatttttatttgctaagtctggtacccataagccagatataagcaactggtcagacaattgtctatatttttatttgctaaatctggtaaccctaaacctggtataagcaactggtcagaaaattaccaagagctcacttctgagaagagagtgtattcagaaaaagtgggctgggcacataccaagatgttgcagagcaaatataagggataatggatggacttaacccagataaaatggggagtgagtggcaagtggagggaagagagcggcagttatgactaaggatttcaggctgaggattgtgaggacaataggatctgttacataaatagaaactaaaagggacaaaatagggttgtttttgtttttgagatggagtctcgctctgttgccaggctggagtgcagtggtgtgatctcggctcactgcaacctccgcctcccaggttcaagcgattctcctgcctcagcctcccgagtagctgggattacagctgcacgccaccatkcccagctaatttttgtatttttagtagagacggggtttcaccatgttggccaggatggtctcaatctgttgaccttgtgatctgcccgcctcagcctccaaagtgctgggattacaggcgtcagccaccatacctggccaatggacaaaatagttttaaagagtttaaatagttttaaatagtttaaagatggcctgggtgtggtggcttgtaatcccagcactttgagaggccaaggtgggtggatcacatgagcccaggagttcagtaccagcttgggccaaatggtcacaccttgttctacagaaaataaaaaaattagcctggcatggtggtgcgcacctgtaatctcagctacttgggaggctgagggctcaggtaggaggatcacttgggcccggtaattcaaggctgcagtgagctatgattgtcccactgtactccagcctgggcaacagagccagactgtgtctcaaaaaagagagagatgtctgactcattaaatatgagtatgaagtcatcaaccaacagacaggtaaaatggtctaaaaggcaatttggtaataagtgacttttgtaaaggtaatatttaaagcaacctcagttttgccatctaaagcatatctcagatcattgcaagaggcttcaatataacagaaatttacaaaattaattttaatgtaataaaaactttaaaactacctattaggagcacagtactctgctatggaatagtttgtttccttcagggacttaaatatagtctaatacagagttactaattaatgaaaggcaggttggtgagcactataatgaaagtttttaaaaagtcatgctataaaaagagaagaggtaaactagaaggaaaaatgaaggtttctaagaagtggaatttgaactggatttcaatatagagagttagtatttgagctgggctttaaaggacgattataaagggaaaggcactttgtggagaaggaacagttttattaatggatgaagaagccagtaaatagacgtcagattgtgtgggagtttagaatatgagatttagtactctgactttatcctgcatgggatgggaagcattgaaaaatacccagtgtttcatgaaaaccaaamttgagttgttgactataaatagtttttttaatactatggttataaaatttaatgcaattgcctaggactcataacctagaagagatgattaaaaaaaagcaaacataaaaatttatagatcattatcatttatgagaacagttataaattgtcataatattaagagaaaaccatatggtcaccagatgcaaaaaatggtcctgtttttcttttttttttttttttttttttggagacagggtcttgctctgttgcccaggctggagtgcagtggcaggatcatagttcactgtagcctcaaactcctgggctgaagtgatcctcctgcctcagcctgctgaggtgctgggactgcmagcatgcaccagcatgccagcaaattttttgctgttgttgttcttttagagactgggtctcactatgttgcccaggctaaaaagagacttttttttttaataattcaatatccatttcctagagagtttagaatatcaggaaatgtccttaacgtcacaagtggtatgtatcaaaaattaggaacatgtatacaacactggaaacatggccattaaagtcaggaacaaaacaagaatcaccagtgttctggatgtcctaatcaatgtgatgagattaaaaagggatacagggaaagaacaaaaatatttgcagatgatcatctaaaaaccactatttattttttagacagggtcttactgtcactcaggctggagtgcagtgacataatcatagcttactgcaaccttgaactcctaggctcaagygatcctcctgcctcagcctcccaagtagctggtactacaggtatggactaccatgcctggttaattttttttttttttttaatttttagtagaggtgaggtctcgctctgttgcccaggtgctgatctcaaactcctgggctcaagcgatcctcccaccttggccttccagagtgctgggattacaggcatgaaccaccatgtgaagcctaaaaaaacactttaaattggtataaaacaggccaggtggccgggcatggtggctaaaacctgtaatcccagcactttgggtggccgaggtgggcggatcacaaagtcaggagtttgagaccagcctggccaacatggcgaaaacccgtctctgctaaaaatataaaaattagccaagtgtagtggcaggtgcctgtaatcccagctactcgggaggctgaggcaggagaattgcttgaacccgggaggtggaggttggagtaagctgagatggtgctattgtactccagccttggcaacaagagcaagactccatctcaaaaaacaaaaaaaacagtcccgatgtggtggctcacgcctgtaatcccagcactttgggaggccaaaatgggcagatgacttgagtccaggagttcaagaccagcctgggtgacatggggaaaccccatctctgcaaaaaatgcaaaaattaggaggctgaggtgggaggatggcttaagcccaagaggtagaggttgcaatgagccaagattgcaccactgtactccagtctagaaaacagaatgagactatctcaaaaaataaataaaaagtggttacaaaacaattgsgactagtaagtgagcagtaaccacataaatatgccaaaataaatagctatcttctcctcaagttaaaagctgccatggtgtgaattcatttccactttttcaaagccatcaccttttccaggctttgaaaagctaacctcgggactacttgctgaggttaaatctgtcccaaaaaagtaccccaagtccatgaagtcttgcttatgttgtcttaaattccagcccccttaattgaacacccttaaaatccaatcctaagtatacttctctggctcctgatagtcatggtaacttatttcaattccttcggtgtgtaatctttcctttcttatcagggccagcagttcctaggcagattatgctgagatgttaactccagttaccatggcttggcagccaggagaaaaactgagaacaattatggaagaggtctttctgtaatgagggaagtgcttgctcttactaggaagtatgagccagttctgtaagctcttgagtgtccagaggtatctacagagccaaaatcctcaggggcaccsattccatgtttcaaagcttcaggctggtttccccaaccagsgccctgactacatactggatctccctaggctgagcattcaaatatctttagagctctgtgaccatccaatcccatttctgctcttccrctgcaggaaataaaagtttgttaagctccagagaagcccccggctcccacacttagcctttaactgtttaagtgctctcggtttctcattatccatctgcaaggcattacttgtcttagtaacagttggccagctctgctttctttgtaggcatcgtattccccayatcttttaaatgcctaaattgcacgagcaagaggatttcccttctctgggatgttttcctaggtcactgctggctaaatcaggactcagatggctgctttgtgccagggaccaagtaagccattgcccaaaacccatcttactatctgttttcttgcaccacttggtaaaccacctgtctgttctggtcctcagagaagcagatgccaagaagggattagacatgcaagatatttattgggggaaatgtttgtgaaggataaagtgggaaggctcaggaattggcagagagacttcagactgtggtgcaggtctgacttctgtaaaaagaagagaaggaaatattgggtagaaagagcctcgactacactgtagttctaagatagtctcatccaggctgatgagaagttccccaagccaaagttgcccgttagaggagttctgcactgggcaagaaagaacaagtttagtactcctgctgtgctcagccactagctgggggcgactccagagatatgtggcattgacatgaatgcatggtagttccaaaggggtggcagctggctgtcagtcacttgtagtccccagagtaggttctcttgaagatctgagtggaaacttctatggccacagtcaaaatgcaatccagggccaggtgcagtggttcatacctataatcccaacactttaagaggctgagatgggaggattgcttgagccggtaagtttgagaccagtctgggcaagatagccagaccctgtctcaaaagtaaccccataatcattccaaaactgtagcaattaaaactctgtcatactagaattgaccaactacagcaattgaaacagtagtgaattcagactcaaactcagatatatgttatgtatgtatatgtatatgcatgtaaatttagtaaataatatgataagatagcattttcaatttgttttttctatacatgatgttgagacaactggatggatatccatttggaggaaaagttttaaattagcatcctacttcatatatattttaaaaattccaacttgattaaagaactaaacatttaaaaaccatgaaaatatattagaactccagaatacatggaaaattaaccatacacagtatgtcatctctttgacagctaaataaatttttaaaaagtgtagagcccaaaaggcaaacaaaatacaaaagaaatttcaacaaatggttgtatgacaagccgatggaagagtagtagtagacttgacagcaaaaggcacaatctaaaagcctccacaggtgattaaagaaaaaaagaagaggtaaggccaggtgcagtggctcatgtctgtaatcccagcactttggcaaagaatataaacagttcacagaaaaggacatacatgtgaccttttaaaaatataaaaagatgccgggcgcagtcgctcacgtctgtaatcccagcactttgggaggctgaggcaggcagatcacgaggtcaggagatggagaccatcctggctaacatggtgaaagcccgtctctactaaaaatacaaaaaattaacctggcatggtggtacatgcctgtagtcccagctagtcagtaggctgagacaggagaatcgcttgaacctgggaggcagaggttacagtgagccaagatcacaccactgcactccagcctgggcaacagagcaagattccatctcaaaaaaataaaataaaatgaaataaaataaaataaaataaataaattaaaagagctaattctttccacaaaaaaattagaaaggatcagggcagaaaattttagggaagggtgaaagcctatataaagaacacctacattcctgggtctattccccaatcccatataaccaaaggactgccaccccacacacatacacacatacacacacactcatacccacacatgcccctataacaccatcaccacatcccaggagcctgatttattttctagaatgggagagactcttgacttgagaatattagtcacagtaggtagtaggggactgtgaagcagggctaaagtgagcattaagtgaaagcctgaatgccaaacagtgggacctctagcttccttcctctgcctccttctagaatacctttacccaggaaagatatgggggaatccctgaataaactattactgccccctctctactccctgcaagagacaagacttctaaaaactgatatttggtgagtggttggggagggactatgattgaaagagaaagatcaccctgaagaaggccagaagtctatagttttgctcttgagaatagaaagccagataggggccaaaccatgaagagctttgaatggcatcataaagaactttatcctaaaagaaatcaggaacttgaaagatgtcaagggaatataatatggtcagatttattccatgaatcttactcagtggtgtgtcaagaactgactgcctggagatagaaattagagatctcagtctgggactttcaaatatgtaatataagtctgatatggtagctattaaattgcctgctaaagggaatgtcaaattgagtagtaaacttctaagggaagtttcattctttcaatagttattgagaacctgctatgtttgacaccctgtgctagactagagatacaatggtgagaaaaaatgcagttccctggactaatagaggtttttcatctggatgagaagacagttattaatcagaaatcatacaaataaatataaagctacaagtatgacaggtgctacaatggaggggtgcatggtgctataagcgtgtaataggatataatggattctgattgtattcctagcatcgattttaccgatacctcatagagtaacattcatgggatttaggtgggattaacgtaacttccagttccaaggataggccctgatttgccctggccaatcagtgcttgacattctctagaccacaaaactctaggtttaggggcggacatgtgacctaaattaatttaatcacattgaaactgtgaaatatgtgaaagaaactctcttttgatatggacaaagaactacataaccttgggagatcctggccaccattttatgatacaaaaggagtaagccttaggatgaatctgacatcagaaagaaaattgagaggtagaaggaaatcaagttcctgctgatactgttaagtcactcaaatcaacctgaggttcaccttatcttcagacttctcatttatgtgagccaataaattctcttatcatttaaactagtttaaattggattttttggtaattgtaacattccaagggggatttgttcgaatgtggcttttgtcaaagaaaaaaaaaaaacccaggggatttgaaataggcagtccaagaaggctcctccaaggaagtgataatagtggcaacatttaaaagataaaatgggagttattaggagatgattggtgaggaagaaagctccagacaaagagaatacctgtgcaaagacagcaagcaggggcatgagtatgaaaaaagagtgtgcgggtactaagatgcagctggagaggtaggcagaagcaggatgaaaagggctttttaagtcattgaaaggattctggccactgaaatatttttcataacatataggggtggataggatacatcgtataacgcacatgacagcccctcacaacaaattatccagccccagatgtcagtggtgcttaggttgaaaaactttgctctaggaaattaacctacaaagatattggcacacataaaacaacttttgcacaatcatatgtttgaaattacgaaccattggaaatgacacaaatatacaataaatgagttaaataaattagggtacatttgtacagttgatgcaggatttttcttggccactttgacagctggagacctccggccagcaacaccccaactactcggcccaccaggatgtgtctggcttgtgctcaggcacgaatcctgcagccaccatggcctcagcccctggcaggagggggtgtgtgagtgaacgagtacagggcaggagtgggctctgtgcggggcttgtggctggaccaggtgtgtcacattgagggaaatgtggtggcacccaaacaggggtgctcatgaccctgaagccccagaggtgttacagtatgctaagcactcttttagttctgccgtctgcaggccaacggacagtggcatgttaacagctctatcagtcccattgccccactcaggcccgtggcttcaggactggctctgccccactgctgcttcccatcgcgttgtgtgggacggttgccctccaccagcagagggcaaagggccacagtgtgtacagccttctttgtatctgcgtttggtgggtcccgaatttttcttcagcgtccaagaatgaggttacgctgacaatcaaagggtgaggagggtggagaagagttttatttgaactatgaaacagctctcaggagagagaggatgcaagggtggtccctcactcaaagtcaggtggtctctctctcagtgcggctgagtccacagcttttatgggctcagaatgaaggcgtgcatgctgattggtttgtgagtatgcaaaaaaggctaaaacaacagcaccactcaaaggtaggtacaacagtgtaaaaaaacaattaggaaaggatatgtgtaaaataggtgaagggtggggatcaatcagaagaaagcacgccaaatgggaagagaggttctcaatctggtctgtggatttatcctggtcttgtggctagcctttaaactgtcctcagcttgaagggtttcaccagggacctgcccctgtctgcctaggatttgtctgccttttgcggctatcacagtgggatactatgtagccattaagtagaatgagttagctctatatacacactgacccaaaaaaggctgtcctgggcacggtggctcacccctgtaatcccagtattttgggaggctgaggcaggtggatcacatgaggtcaagagtttgagaccagcctcaccaacatggtgaaaccccatctctactaaaaatacaaaaattagctgggcgtggtggcggacacctataatcccagctactcaggaggatgaggcaggagaatcgttagaatccgggagacggaggttgcagtgagccgagatgacacctctgcactccagcctggactgtgtatggaaaaaaagaaagaaaaaaaaagtgggggacaggggttcagatatggtggctcacacttgtaatcccagcactttgggaggtcaaagcaggcagatcccttaagctcaggagtgtgagaccagcctgggcaccaacatgtagagaccctgtctccacaaaaaataaaaaggaaggaaaagaatagtattccattacagtcatgtgtcccttaacaatggggatgctttctgaaaaatgcatcatcaggtgattttttgttgtgtgaacatcatagagtgtacctaaacaaacctagatggtagcctactacagaggtccccaacctttttgacaccagggactggttttgtggaagacaatttttccatggaaagggggagttggattctcataaggagtgcacaggttagatcccttgcatgtgcagtttacaatagggttctcactcctaccagaatgtaatgcccctgctcatctgacagggggcagagctcaggccgaaatgctggctcccctgccactcaccttctgctgtgccgcccagttcctaacaggccctggaccactactggaccactacatacatatctacatatagttacctgtatatgcatagaatatctctggaataggactagatacatactttgtgggcccagtgcaaaataaaaccgcagggcccttgtccagaaactttcctgaatttcaagttagtgacagcaaaacattaaaccaagtgcctatctgtacaggtcaccaccatgaagccagccctgctctggcaacatacacaggaaaatggaatagaggtgattccaagaggaaaattctatgagtggcaggagacaaagactaaaagaagacttagttttcactatatatctttgcctttttttttttttttttttttgagacagtctgtcactctgtcccccaggctggagtgcagtggtgcaatcttggctcactgcaacctctgcctcccaggttgaagcgattctcctacctcggcctcccaagtagctgggattacaggcccccaccaccacgcccagctgatttttgtatttttagcagagacagggtttcaccacgttggcctggctggtctggatctcctgacctcgggcaatctgcccacctcgccctcccaaagtgctgggattacaggcgtgagccaccatgcccggcctctctttttaatttcatatgtgtaaaggcattacttattcaaaacaacaaaaaaggaagattgtgggcttatttggttagcaactctttgaagtggaactttgatgactgcctgaagcaaagaacatctgctggggaagatgtggttatggggggccctcagacttggataagcactgagccctgtgctttggaggggtctgaaatccatggaatcatgggactgtagccacctgcagcccactttcccttttccagaccatgctgtgggcactctagtattccctatcccaaacgccaagcctgactccagggtctgcacaatcctcttcccaagttcagtcttcctggggagtaaccaaagggtgaggcttggacagaaggctggagagtctaacatcaggctcaaaaattgtgtgaagcattctctgactcttccaagacagaaatgttattttctctgaggtcaaaatacattttgtccactttcatcacatcaattaattggctctattgttatgtattatattatgatgattttcttcaagtacattttctgaggtctctagattaaaaaaaaaaactatgaatccagattttgaaattatttctatcagcatgtgttctgtacactgacccacgttgtagtgtactgctgaagggtgtccacacttaagcgatctggtcaaaacataagcacgttttaacaagaccattgat

SEQ ID NO: 97384 - DNA, 17094 bp, Homo sapiens
agaaggattgaatgaagggcagcagtacccagagactacaggaaataaaaagggtcaagagaatggctgggcgtggtggctcacacctgtaatcctagcactttgggaggctgaggtgggctgatcacctgaggtcgggagttcgagaccagcctgaccaacatggagaaaccctgtctgtactaataatacaaaaattagccaagcgtggtggtgcatgcctgtaatcccagctactcaggaggctgaggcatgagattagcttgaacctgggaggcggaggttgcagtgagcccagatcgcaccattgcactctagcctgggcaacaggagtgaaactccatctcaaaaaaaaaaaaaaaaaaaaaaaaaatcaagagattctaatcccagaagctgccattgacataggtaggggttcttgagcctacaaccaagcttccttctcaggcaattgccggcagccccaattaaggagattgtccaaggcagtcataacggcaatgtgctcttgtcccttatttctcatgcgattgcctggtctagagcagtttcctgagcagaagtgagccacccagattcttctcttaaaatctgaaatcggaatagcgaggaactaggagagttatttatcagaacctgagcctaaggtgtatatagaaatggggccagaattggctctaaggcaagcccaagctgaagttatgggagcagaaacgaggggtgaggaagcagatctgcagagagaagatagcccaggtcagagagaggcagagatgcaggactgtttgcatcaggcagaacagcagcttgggccctgtgcctgccagtttcttggattctgtttccaagaggcctgcctggctgggtcaagtaactgagttctgtatctgttcaataaactctcctttaagtgggctagcttagcttaagtgtatctctctctgttctctacatgcaaaagaaatttgagaagcaattggtggttgaacatgcaatggggcaaaccattttaacatgaattggggatgtgcctgagaagacccaactttcccaaaggaaccaagaacacagccttggaagaaatgagctggaaatatcgcgctcatctgtaagtaagctgaaagttagttcttgtgtgtatgtatacagtggcattctctatttctgacacttgactcagggagattctcctgattggacatctgacctagtgtgagtcaggctaatgccctgcaacagaggaacaatgctatggtggagcccccaacaccaaggtcccaagtggagactcttctttgtgaccttgggaagtggtagtggaaatgaccaggaaatgaattggtttggttttcctccccatggcagcctggccttacctaagggcttgtaggccctctttccgtgcttttctagatgatttgtaagggattggtaccacactgaggctcttgtaaaatcacactggctcctattccccttggacagtgtcagccaccagctctaaacgccttccgatgttcaaggctgcagactcagcacccacatcactggcctacatgttgctcagcaagtgtttcctgagcatcccctgggagcccatttctgtagcaggtgctctgtgcgcttggcttctacatgtgaagaaaacagttcattgactgcttgatgtgctctcctgttggaaaggttctgctgctttggtgggcattgccagggcaaccagaccaagagtctgttaattaattaatgcaacagtgattgcacccaaccttagcttaacggaagagaaaactgattagaataatttgcttcttggtgaggaatgggtcaaagagaaacgcagagttttacagccaagtagaagctttgtctcagtttaaagctcactggaaaaaaacacagataatgggtgtgggggcagtgatggatgaaaatagttcatctcataatcaaccagaagaccaacagctaaatattggaatgctgcctttggagaaaaggaaaccacagtatcaagagtcaatcacaggtgaggttcaattgcagagtcagggttcagaccccatgtagaggctagtcttctaatcagggatcctgaaaagatccacttagaagggctttgatgaaaacagttgggaattcaggaagaaagacacagacatgtatgttttgtgtaatttttttggtttaattgtgtgtatatgtgtgttataacaaaaataatttgtgattgtccaagttctacaaagattattgatggtttcttaagtttattttatacaaaaaagtacataatggttttttacttaaggatgcaaattattttttcccacagtcctggctgtcaaagcacaaaaaagtgctttgagccctattcctgaaacataagctttctggtgcactccaaaggaactcttttgtaggctgcactaagctaatcagatactttctgtcttcaagattttactctaagaaagtaaattagttagtattgaaagcttggataagatgagaaaggaagtcacagtgacttggtgttatgcgctgttttgttgtttttgtttttttttttttttttcatgagaacccagaaacagagaacaggactagagagaaggagaattcattcgttcattcattcattcattcattattccttattcaaaagttttactgagtcccttctgtaagctataccctcttctgggcgcagatgatacaacagtgaatagaacaaagttcctttcctcatggaatttacatgccagtgaggcaaaggagagacaagaaataaataaacatattatatgtcaggcagtaataagtgctatgaaggaaaataaagctgctaaggcaatagagattgaggagattgagaagctgctatttcagatacagagggcaggaaggtgaaagaggagagtaatccatgtggacatccaggggaaagagcgaagtgggtggctgagaggatcagggacaagcttcacgtagtcctagagaaatggagacgggaatctcaagatctggccatcctaccacccttgggtactataagatactctgtcatacatctaatgaattgtctcttttagcataaatttgagggtttttccttttttgcagctaacagattccatttctaaacccagaaggtgagtctacagcagttagctatgagctacctagaattccggcccgggctccctagtcagagagtgtggctcttcaccaccacctgatggcaatgtccttgaagcacaggggccttcacaagggcaaaacccagtctgggagctaaagagatgccaagagataataactctgcagctgtttcttatgccagtgttagcaaatctcgaaactgtaaagaattatattcttgaaagcattaaaagagcgtttatttgtgccagggtcattccgttttggctggagggttcagggaaacgtggagatgtgagctgtgattttttgaattgagggccagagctggtccccctcttggattcagtttatacagattactccttgatgtttctgaatgattctacatgtaaacctggggtctgatctctttctggccttctgatctcactatagctaaaaaaccaaccaataaaatgggaactctttagaattacatggatccttgaggcacacaagtactcaaatgtcagcaaggaatatatgcagcagtgtagctgagggttctgactgctgctgcgcttgcgttcaagggaaataatatgtattgagtaccctggtgccagacacttgacatacgttatctcctatgcccaaagaatttacccctttctaaagatgaggaaactgagcttcagagagattcggtaccttgatgaataaaaaaaaaaaaatgctgattttgcagctgggcgcggtggctcacgcctgtaatcccagcactttgggaggctgaggtgggcggatcatgaggtcaggagtttgagaccagcctggtcaacatgatgaaaccctgtctctactaaaaatacaaaaattagccgggcgtggtggcacgcacctgtaatcccagctactcaggaggctgagggagaagaattgcttgaacctgggaggcagaggttgcagtgagctgagatcaccccactgcaccccagcctgggtgacagagcgagactccgtcttgaaaaaaaaatgctgatttgcaagcaattgaagatttgtctggctgataaagcaggaacagaatgttaaaaagattttggggtgctcacagagaaccagggctaagcttccagaggggatcctaacaccggactgcaaaactggtgtgacgagggaaccacagctactctcacagagaactgcatgccagtatctgcaccactgccacttctattcaggaactccactggactgcttctgctcttgctgccagcactgtgcttcttttgcaccaggaattagacctttactctgtcactagtctcacttctcttttgtctcaccagctctaaggtaaaaagtttggtgcggaggcttgattggcagagtgtaaatccgggctttagctgcaagggaggctaggaaacgaagtagctggtatttttcaactctgttggcaaaggctgtttcagtctctcatcaaagtgggggaattcccccaagatagaaagtggctcagatagaggcagccaaacaaaagtcacatgcccaccagagctgcagcagtgacatagtcagtgaggggtggggttggtactctatttccagagcccacttcatatttcctcttgcaggggtgccaaagtagaaggcgatgctcactttttaagaccttattgaaaaaccatagtgttgagcattttcaatatgcccaacattgtcactaagatgtgaggctataaaggtgcaaaagacatgatggttgccctgcaagtgatagcttcatcttcatcacatagtcctgagcaacagtaatggatgactagtatattgattaccttcggtaccaggtgctttgtatacattatctctaaaggctgacaacaaccctgcaaaaagatactcttaataccagatgatgaaactgagactagaaaggttacataatatgttcaagtcacacaattaataagtagcaaatcccagggtagaaaatgaggtctctctggccaactccaaactggggaaactggggccagaaagattcagtcgtttggcaaaagtctgctgtcagttgatagcagagttgggatcagaactctagcctctgactccagcccttatgagctgagctgactccacactgtgttcagcaccgcctttttgtctggcgttgcctggcgcctctttaccttcatcgttctgaatgccttttattcagtcctgaggtttttaaacatgtcctttccagctccattgttttgagggacagtgaccatctcagctgatcctgcgtgggagtggggagatgtcactgaagccagaccaaccagagacctcctgagggcaggctggagaatcagggcatcagccaggtgatctgtaaggtcacaacctgatctgctctccatgatgagggttccttcctagggagtgtgactcctttgtggagagaaagctctggatcttaactcccctctgtcactgctgggctttgtctcaggtggtcaccttgactgctggcaaattctatccctaaaggacaaagacagtcagctggtgatggtgaacttcctaatgagaaaagaggacttttgaagaaagaacctgttcaatgagcaccattattttttcagagaacctgtggcaggggcgtgtcatgagtgaagttatgagggggttcgatgtctggtagggagagacgatattataaaagaggtcatgggaggccaggagaaaggagagatacatagagaaaggagagagagagataatatgaagtaggacagttggttctttacatctttctctcacaccttccactactggcccagtttctaccatgattttctaaccttagttttcatattgcctcttagtgtacccatgatctaaatctaagggcttaaacattattattgttgttgtattagcatcaatgggccatttccattcagtttctataaatgggatctcataccacctctctgccccgaattctctctctctctctgcgtgtgtgtgtctctctgtcacacacacacacatccaacacactagtgaaaactgcagtgtcatttgctgcaccctggagattactttgtctttgagagtccaaagaaaagcccatcagctgtcaagggttttaattatttatttttaatcacaaaggaatgcctgactatgttctggttgtaaaaaaattcacacaatacatctgaaatgaaagtctcccccagtgaagaattttaaatagctctggtcctcacccaccagcccctgggtctgtggtggaccagtgctgggagatgtaaatggacctggtaaaggtttggggaaacactgaactcttgtaatacagggagggctggggaagcagggatcacctgtgaaatgaaatgggagtagttaatggaacttatcctttacatttaggagttgttgactttgccagggatgtgctcttccatttttgcagttttcttttaaaggagtgaggaagaggagacctgggctcctgtatctctgtagggactcactcttttctctaatgagctgccttaagacagcatgcatcacaggcagacgctcagcattctgctgtacttggccatagcaagtggtaagacttttgtcaaattcatgtctttctcaccaatattctaatgttgggtatttcctttatgactcaataagcccctgtataaatttgctacggggccaaattgagatgaatgcagagttttagtaaagaagtcagaaatgtattgaatgaaagaaagatccaaatagaaagtctcttggagaccattgatttagttcttcacttktcagaagaagacatgaaagtccagagaggtttgctccaatgccccaaatcacataggcagagttaggagcacagagaaaaccagaattccggtttcagactcccagcctagtgttgcttccattacgccagtgttggaatccagccgccactgttagctacctggaaaacctgggctggtctcaataaccctggagcccagttttatcatcactctatctcccttagggtagcatcgctaagagcatccaataaaattgtgactgttaagtaccacgtaaatagccaagcaattttcaagtacaaaaaaaaatgaacttcttttcagttactggaaagacaagcattcttcattagttagtcatgtacagtagcattttgtgaagcatcacctaactgcatgtaagattttaggaatctggccctggaaactttgctgttttattttttatttttttctctttttaagtttcttaaaaattggtgttatatgataataggacattattttacattcatttaggtgtgataatggtgctgtggttatgttggtagatgttattaatttggggaatgcatgctgaagtacttctgggttgtttagggttattatttaagtgttatatattatgacatctgtaatttacctttcagtggttcagcaattataaacccatgcatatgtgggcacgtacatatatatggcaaaacattaactgtttttgaatctaggtatattacatgtgtgggtgtcgaatatactattgttctatttttccatatgtttgaaaatttttataataaagtggcctgtaaaataaattcttccagtgatactgattctctctgttttgagaaccactgatgtagagctatagaacacgtgaccagtgacagtctgtgagtggactctccatgtgactaattatgacatgggattatctatgctcctggttccagtttaagaagaaaataagagaaaatcttttaaatttcctccttgatgtctcatcagaattggagccgcttttcctctgcaatactggtaaggttctattttcctttgctttgttttgacagtctgatttgtctgttgcactgaaatattgaaacggtacgccatctttcccatttccagggaggcctacaggtggaactgattggacttgaaggtattgattagatcagtggttcccaaacttgggtgcctagagacatcatccataaaatttcagcaggcttagggtgaggcagtggcatgtgactcttagcaataacaagagataattctaatgtatatctaggtttgagacccagtgttttaaactatgatgacaacaaagtcaaggtcatgggtttggttcccaatttaagagatatttagcttttcatggagaaaagttccattccatagttacattctctacaccatactctgttctaccattttaaaatacgggtcctggtagaaaaaaaatgaaccaggaaaaagaaaaaggttttaggaaaaagaaaaggaattagggcaatttacaacaatgacaacaacatatatatatatacatatatgcacaaagtcatatatgtatgcacaaaatcatatatatatawaaatatgatttttccttcttgttagaatttggtatattctgttacagaggtggctgcrtattattgatgggtgaaaagaggtttttattcgttgttctttcattaccaaatgtatcaactacctcaggaattttggatgaaaaggtaaaaatgttttgtcagcatcagtgaatcgtgataaaaatgagtgatgtttttaatgaaaaacacttgatgaacacttaycaggcaagcatgaaaggagaaattgaacctcaggaaacagaaaaatgaacccccactcaccaaaccatttttgttattaacactttctggggcctctaaaagaaaggaaatgctgtaaaggaaaacaagagcagctctctggcacggccttggtttctgcagtaggaatcagcaggatccttcaccggcacaccataaagcagcttcccttgttcttatgtaatatgtctttgcagcttaaacctttaattaaccagagatgtcatcaagaaaagtttgctaaggaagaggatgcctggtttaattaaaaagatctttaatagttattaaggaaatcaatttggaattcaggcctgagagcagtgatgggggaagaaatcactgagaggaacttctccatctctctgggtaatggattttaaccctttgatctgatctgctttacaatccccagggcagtggtccagggcatggagagggatgcttgtcactcatcatttttaaatctacatcccagatgtaagagagcagttctgccttacatggcagaagcccaacctttctggaatgcagttatcctggcaattgaaagaaataggaaacctttataaattgaaaatctcctacctcataagtataagctatttttttccccaaagagatgcattatttctccctgaggatttgcacttggactgtacatcaggcgttttcccattactgctccaactggccttcttcggatcaagctagaaaaagggatttggctctttggagcataagagaaatattattttcacttgtctcatgaaaatgatgacacaaaaggtgaaatagccagaggatgggcaaaataaattgtctgtgtggcaaaaactgtaaaaggaaaagagtttttcttttaaaaaacagcattctgccaacaggggaatgatattaatatcatcatctgacgcagcccagttgagttcaaatgctgaaagcacttctcaaataatctatgtttaattaacatttgcacagcacttagagagggaaactgaagacaggtgcagtgcagagctgcaaaaacgactttcctgttgcaatgtagctatttctcaggtggactgaagcgcctctatctaggactcaacattactcaacagaaacccaagaggaaggactagatcttttaacactcaaggctttattcaaatcaccagcttacattttctagaagagctggaacaggccttatttatttgtattcctcacagcaaattgcccagagtcttggtcacagtgtctttgttcattgttttgctcattacctagaaacttctgggcttagcagcctccccatcccaccgtagaaatgcctcagctccctgattcacttgtcctgtgaaacctagtgagggatgtcacttgggagcaatgttgggtaatgcagatatrttatagcccacagtttaccaatgaactcatcttgctgtaggcagttcgtgcaatttctctgggctccacttttctcaatcacaaaatgaggagtattgaactacattagagtctaaggcccctcctaatataatctggtgtactctttaccctttgtcctagcttggtagatctgttcccacattagaagatggaaaccaggaaaacttcagtacttatggaaacactggtggctggagtagaggttgcaagctggcaagcagcaggctggattcagactgcagacctgtttatttagcccatccaatgttttggtgggctggtggtgggggtgattgaattaatcgataacagttaaaatccaggaggtttcacatcgtcatctggacttatgcttttgttgaggctggaaaactctggcaacactttactggcactggcaatgatgagttggagctgattccttgctagtccagtgtgggccccgctactccctactgtgtcctcaatatgaaggttgaatagcagtttcattgttgtcattgtgtttatgctatttttcccccaaccctatctcatttcactcattcatgttactttcatggcccatgtaggtatgtgggtgagaggargaggttgttggaagaatgattggagtctggtgtcaggaatcccttgcccttcaaagagacagtgtgctgctatctggctgcttccatgagctgcaaagtgggtaaaacatcttcagttgggtggataggataagactgtcattgactgatatgcgcaacctaattacttccttagttacttaaagctggcttcatttgtccaaattgtctcttctttggataagcatcttgactattgtttacttagaataatgccccacatgaacagagtatcccaagttcagcacacatacaaaacaacttaaatagcaaacccacatttttactcatctaagaaaagcaatcttccttctagaaccatcaccagaagtcctcctgttgattagagtggcctctaatttattgtctaaaatagaaatttcttgaaagtaaaatgaggcagtataataattatgccagaaaaatcagaataaaccaggaatttcccaagcaaactggggcataaagccaccctgctcaatgtgcaatatctggtagtgacttgatgacaaaatctgctgtcggtcactagagattatactggattgtcccaggtccactcctggggtatgcttggctcctcttgctgctgaagtcctagccagactggagaggccccatcacagttctattccttcttggatttgagctctcctgcccacttctacctttcactgatgcctctaagcttaagcctaacaggaaagactgtctttgtcagagataatgcaagtggctctcagatttggttgtctgaaattggggacctggggagtgacatctgtccttagatccttctatttcttctgcctgtgctgccctctgtcagagtctcctctagataattcaagggaaataattttctttttctttcttttctattttttttttttttgatgatggagttttgctcttgttgcacaggctggagtgcaatggcgtgatttcagctcactgcaacctccgcttcccggattcaagccatcctcctgccacagcctcccgagtagctggattacaggtgcctgccaccatgcccggctaattttggtattttttaaaagagacggggtttcgccatgttggtcaggctggtctcaaactcctgacctcaagtgatctgcccgcctcggcctcccaaagtgctgggattacaggcgtgagccactgtgcaggtctcttttacttttctttaggcaaactgggtcacaccttcatgctagaactttgcatattctataggggctggggggggggtgggggaaatttctcagatcaccacagggcaccatcactgaagatcaaaccactttacacaaccagcaaagacatatcattgtagcagtattaagttttacacttggcatttgggtgagaaacaaagaaagtttggggcatttcaaacaataaaagaagcaggcttttgaaatgcaaagatatagatccctttcaaggaatcgaatataagaataaaaggagggagaggagttgagggtagtgggctggtgaaaggagttgtttaatggaaagagaaagatccagaaaggtgactgtcagatcccttagataaagccacccatctacccgtcaaagatgagaggaaaatccagctggctttattcttttgacaaagattcactgatgtggcagaaagatgaggtaaggggttggtaatagctcatcctcattcaccacgtggtttaaactattccatcactcactctataagaaagccttgcaggaaacccaggacatgcggttttgacaggatctatagtggcaaggaaaatggagaggaacacagaggaaaggggagctgatgtattatttacagtggagaacttgaacagagtcaactgcaggagtcagcccaaagacttgtatctgtatgactgtggaataaagacagacagatctttgaattttcactgccgctctttttgctgctgggccagcatgtgtgcgactcatcttctcactgtgctgcaatctgccctgctactgcttacctttccctatggcccagaagaggtaaagacctcaacagaaacctgtctgggcctctgtgggtgaaatttcgttaggttggcacagagggtgtctcgctgattgtgacaggtctaataagcgtgcagatggcaagaagcacacacacagccactcgcgcacacacagcctccctgaagtcatgcagtgggcagagaggagggactcagagaatctgatccaaaaggaacaaaggctgcagcctctgcagtgggctgagcgagaatgatggggagacggctacaggaaacgagaagcgaagtgtgagaatccacagcaaaagccgccacagagcatatgcatcggacttcacagcttcctcctgcttccagcttgcatttgctccatatgctgctttacactgctttccgggccataatgggtttcattccatagtttttatactaacatgaatgactcacatctgctccagtacccaatttgctctctaatgtcttcggctgtgaggagagaacagcttacacagaactcgccaacaacaggagtggtaaagaaggtcctgatccaggacaagaaaggtcagaaccctaaatgcgtcagctgggagggtctttgagagaacatgacattgccgatgggaaaccacagacccagaggaatgaggagcttggctcaacaatatcaagactgaggaggtagatctgttttaggagatccaggagaaccaggagagtcctagttcagagtgtatttattttttttcatttcctgccatgttaagtcttttgctaggagcttttcctccccatattggctgtgataagaaaaaagtaacttggattaatcgccaatgatagctaatcccccgctgggatcaaccatactctgcattacttaagcttgttattttatttattcattttttgagacagggtctcgctccatcacccaggctggagtgcagtggtgagatcatagctcgctgcagcctcaaaatcctgggctcaagtaatcctcctgtcttagcctcccaattggctgggactagagacacctgccacttcgcctggctattttgttgttgttgttgttgtttagagacaagctctcgctatgttgcccaggcttaaagctggttattaaagcgtttcaaatatattcctgagcatgggggacccctggatagactgggttcctggagagacctacagaactaggccccgcatggacactcacttcacttccagatgtttgaagtcccacttgaaatctacttcagtcctaatgatatttactggtttgacaacccaaactgatatctgatatgatctctggatggatcagctaatgacacctagcaaaactggattcccttgacagcttccataggcccaggaaatcttcctcacttgagtagaggacaaaataatgatttgagaagaaaatcattcctggaaggaaattcccactctctgagacattgcagtccctgcacggagctgccttcaccccagggcctcagtttccccatatgccaaacagtcagaatgaggcacctcagcatctcagcagtgtggtgagcagcgtggtggtgctgcaccatctcaaaagcttggcggtgttcttgtgtaactgtctgccatctgttactcagaagcggcattacaaagcgctgagcaatggactcctgtgctgcagcttctgcctggagccaacagcagctcagcagcttgcctgggggtcccctgcagagcctgcagcagaacgctttgcaggcccgaaactgcaggtcccgggtgaggctcctgaaagaggtccaaggtgcttgggatgctgcagaggtgagttctcttgctgctccccctacccctcccatgatgatcatctacctgggcctttgctgggacaaagcattggctggggagcctactcccacctttcagtgttcagagttctgataaaggcaaatgctagatcaaccctggggttctgtgtgatggtctaagagcgcaggtagatcttgaaagggctggcaacagtgctcaccttttctgggctgtttaatttcaactgcggttcccaaccccaaacatcttatctacagtccagtcaagaactctctgaggttgaggcaggacttccctgtggctgaaagataaggtaccaaaaacaggaggctttgagtagacgcctccatttctcagtacatgtctttggggagacatcttattgaagaaggaattccagagccctgatttacagctgtctcacctgtgcggaggtatgggagcttgccctacactgagctttatggggagagaggggcagggagaatggtggctgccacagtgggtgcatcgttctcacctccccaagaaactcgatgaagcaagcaaccctccaacaaaaatggcatggttcccgctgcctctgctccccagacagagcaaggtttccccactttgagtggtcagataacaccagcaccttgcattcagctttcaccactactcatttgcttgtcagaggaggtattttccctccattttacagatgaggaatcgaagactgggagaaggtaaatgacttacccaagactcacacagtgagtgtgacagctaggtcagtactctctggtcagtgatctggccgtgattccagcctacttgagcctacatgggaattggagttagaatttgctttgcttctagatccaagcggttttaatctgcaagtgggagggggatacaattcccaaaggcccttgggaaaaggggcttttgaaagatcaccctctgcacccagtatcctcctgcccagggtcactttccaagaatcccaagtggttgttccaactttggacctcttttcttgcaagcacaaagccctgatgcttacagggagagaaaacctttatgggagataattgcgccttaattttttaaaggatatctttaaagttaaaattagaccagctcagctttccttccgttaagcagaaaaagttaccaggcacctgcaggcaggcatagaaacaccctggggagttggctgaccgcggccttggccctcagtagccaggcaagtgaaccgcgggtttggggcagcagccctgccggcgccctggaatcccagccttggctgtggtaggacgagcacattgggggtgggaccccggcttcagcgccacgtgcagcccccgcgatgagcgggaaagtcctcccaggcacagcgccgcctggcgagggccggcccttgggtcccagctggcagctgggggtggcgggcatcccgagtgcaccgctcccgccccgccccgccttgccccaacccacgatggtctgggagctgcgcccagggcttggcgctggcggccccgcaacagcaccgagcgtttcggtcggcgggcggcggtagcgccccctctcagagccccgctcactcccacctgggctcgctccgagtcggcctgtctgtcgggcccgccctccccgctcactccctccgccctcgtgctcctcccggggtgcttggcacagcctcggattcctccctctcgctgctcgagtcagtttccctatcggcggcagcgggcaaggcggcggcggcggcggcggcagccgcggtggcggcgtggggaacatctcggcagccaccgcgcttctcccgctggagcgggcgtccagcttggctgccctcggtccttccctgccacgtttcgggtcgccctgcaccccccacccaggctcgcttctcttcgaagcgggaagggcgccttgcaggatcctgccgcccctccaaccggatcctgggtctagagctccccagagcgaggcgctcgccaggactcctgccccgccaaccctgaccgccggggggtgcccccgggacgtagcgccgcggagaggaagcggcaaaggggaccatgcggcgcctgactcgtcggctggttctgccagtcttcggggtgctctggatcacggtgctgctgttcttctgggtaaccaagaggaagttggaggtgccgacgggacctgaagtgcagacccctaaggtaggcggcttgccggcgcgctggcgctgagcggtggcttgcgggagggcgcgcagcccgcgtgccgggtttgcgggctcccgggaaaccagggcgagggt

SEQ ID NO: 97385 - DNA, 8239 bp, Homo sapiens
tgaagaagaaacagagcttactttgtgcccacatgatagggtcatgtacctagaagacccacaagaatctagaggcaaattttgtaatgtctagcataatttagtaggtttgatgaataacattgaatatctatctctccaatgaacaggtataataggaaaaattagttttcaacatcactcaagccaataattgtctaaatactaacgatttcacattcaaaaggtgtgggtactctcactatgtaaatttgggagactctaaatatcaaaaagatgtcactctttctaatacattcaatcaaataagtgtataaatccatagggaaactgaaggagtaatacagaaaatgagagaaagagagtaaaaaatgacagcaatgtaacacttgatgaatgtaggtaagaagatttgttgcattattcttttaatatttctatatattagaaaatccataaaacaaaaatgaaaagttatcaaaaactattaaaatcatcagtaacagagaaagttatgaaattaattatatatttattaaaaggctattaataagtgggaaattcatattatgatcatgcattggaaatctcaatattgtcaaacatttagttctctccacattgatctggaggcttattacaatgtcaacaagagactaaacatttatttgcttgtggaagttaataagatgattcaaagttttaaataacacattagtcaagaatagctaagatattattaaataaatgaagaagttagaaaaatatttgtaccatactggaagtgaaacttactttttaacatcatagtacagaaaagtaaataagttaactgaagatggaagagaggccagataattgctcatggacatttcatatatgttacaggtaaaaaaatcaagttatgtgagcaaatatgaacttttcaataaatgttggtgggaaattttgctaaaaattcaaaaattagatatgcatatttggatccttatctcatacagtatttaaaaagtcaatcccattagaattaaccaaatttataaggaaagaatattaacaattttgtaagataacacagtaatatattgtgatattcccaatataggataagacacaacactcaccaaccacaagaaagaggcatgaaaaattagtctacatgaaggatagaaacttttgtttgtgaaaacataaccacagagaatatgrcaacacaggtaaaatttgggagatgttatttcaagaatacatttaagtctctaaagaattaatatccagaataaatacatatatatgtatggtttctagttaatctaacatatatattatataacacatatgtcatatatctatatatactagatgaattagagaacatacacatatgtatwaatactkataatttccacagktatttcataatatttccttttagttttgtgggttttctaatgtctaaaaatatttttaaaataatatagtaaatgccattacctagattcatcaattgtttcattgtcattttttactttctttctcattctctgtatcattatttcagagtatcctatggatttctacactgattttacttaatgttttagcaaatagtgacacatatacatatacatgatatatgtcatatatatgacataggttttataatatatatcatatatgatgtatatttcatatatctgtatataactaattagaaaacatatatatgcatgtattctggatattaattctttagagacttggatgtattcttaagaatatatgaaatagtatatcaatttatatatattcayattcatacatataactattaatatgttatttcacacatatcgtataaatgatagattaattaggaacatgccctctaacartcacatgtccctgtatccacttgcttggttatatgaatttccagytccttccaacaagaggtggtgtctttttccccaccccttgagtctgacctgtcctgtaacttgcattaggtgatagaatttcccagaagcaatggttggcagctctgagcctagacctgaaaaggctttgcacatgtccactcactgccttggggtcatgccctgtgctgaggtgaaccctgggctggatggctggaggataaagaactgcatgggagaggggggcgctcacacaratgccccagggacatcctgaagcagagctgcctcactgccctgaacacacatgagagcccagccaggaacagaaggaatggactgagtttaggctgagcccaggctaattttctaaccatggaaccttgagctcaataaatgcttttgcattaagcctctatattaagtgggtttgtcttatatcctaaggtattggtataaatatggtctcctacacataaaaataaagacacacaaccacctcgccaaaaaaaaaaggcagagttaaacaagcacttcgcaaagataaaattctaagagaataaatataaggaatttatactacataaacatacaagaagaaaaatccgccatgagttggagactaaagaacatctaatcaatgcttcattataaaaaataaagaaaaggacatggccccagcagagggatatggatatcactgacttaacgctaacccaaatctgtagttttgatcccatcctattactctccacctctgttgcctctcctgtgctagagtagaagaaacccttatgacgtacacaaagagttcatgcataggaaatacagggaaatggagctggcccaaggctgtcctgagagccttacaagaagcacacgtgtgaaggacactgtgcaggagacctgaggcccacagccccgctcctcacctgcacgttctgtctgatgcgctgctcattgtagctcttggccaggaccacaaccccacgctgcagctggtagcgcagggcaatcagggctggggttcgcttgtgcttttttgccaaggcacaaaggactgggtcctccaagagcaccggggagttcgggtccaccctggaaggaaaggcagaaaggctgaggccctgaggctggggatagtttgttaggcggctccctaaacagactaaggcgtccactctgcaccggagcttctcaagcgaggcccccgaacagcagcctcaacatcacctgggatctcgtcagaaatgcaaattcttccctcaccccaagtcagctgtgagtgaactccaggaaacagcatgatctgattaaattttttttatcaaaccagtgttttaggtaaacttcctgtatctcttattaccatggttcttctcgatgggatcccagagcactataggcaaccagaacaatgtcttttgacttgcagaaatccagcagttttctctggttgaagtaaggatgacattccacctgcagacgagcaagatggaaaagcatcagataatccaaaagttacattaatattaaaatcaccaaagtaaaagaagctgaataatgtagagcattaaatttgaactgagaatattattgtcaaaaatgatctttttcataaaaataaattttatgcccctctctcctaagaaaatagaaatgctatttctgagcacaagcaactccatgaaccctatcctggtttctcaataactccgaccactagaaggagacacggccaatttcagagctgggatgaggtaagattctttgagccttgggcatcaaatcgtgccagaaatcaagaatttggtcaaagactcatgagggcaggtctgaaagacaaaagaactagtttcctaattaataccaaaaatgcatacatgtatatgtatgttttctaattgatctgacatataatatatatatcatatatgccatctatgatatatatctatatagatgaactagaaaatatacatacacacataaatactgataattttcacagtctttcattacttttcctttttgtatgatggatttgtatgttgatatctcaaatgtcaccagtgggttccctatgaaacaagtgcttttgtcttttacacttgccctcatgagtctttgatcacattcttctttcatatatattttatatatatatatatataatatatatatgctgagtagatgtgagcattaaaaaatgagtaaaataaattaaaaatcataacacaagaatccgtgagtctgtagtaattagtgcgacaatgagaaaaagaacaacaatctttgtctactctgatggtggtcattacagtaattacgttcacagtacattgctaattgaaggaagaagttcacctttaccctcacttagaggaatagtagtttattatttttacttggtgagaaatcatttttaattaaatgtcaggtaagaatagttaaacaagtggttaaaattgtaaatgattatgtaaaaaccccaaggaaataacaaataagaaataacaaagaagaaaacagaaatgcagtagaaaaaagttcaaatcactgatgtatactcaatcatatgtgaaaatttgtcatgggaatatgacttcttctgttgagaattatcccccagcagattactagtaattgttaaagagaaaacatgagttaaaaacaacagatctgaccactgttagcttaaccaattgtttttttttttattatactttaagttcgagggtacatgtgcacattgtgcaggttagttacatatgtatacatgtgccatgttggtacgctgcacctactaactcgtcatctagcattaggtatatctcccaatgctatccctcccccctccccccaccccacaacagtccccagagtgtgatattccccttcctgtatccatgtgatctcattgttcaattcccacctatgagtgagaatatgcggtgtttggttttttgttcttgcgatagtttactgacaatgatgatttccagtttcatccatgtccctacaaaggatatgaactcatcattttttatggctgcatagtattccatggtgtatatgtgccacattttcttaatccagtctatcattgttggagcttaaccaagtttttaaaactaccttcaccactagtggggcattctgtgattgtatgcagtctagtgtggtgcaatttgaaaaacacagcatgataaaaatattttcttgccccaaaggtttaagtcaatgtaataaaacactctcatctaacttctaatttacagaaaccttcaacaactgggaaaaacaagttaactgatatcaaaatacaacaatataaaaacaattgaattctggttaaaaaaagaagagctacaaaagatattttgattaagcaaggaaaaattcaaatatggactggataccaaatgacatgagggcactatagatgatgttcttagatacagtaatgacactggaactgggagaatatcttcattcctgtgacatgctttgagaggtctctaggggtcaattgtcatctttacaatttaccttgaagaggttctagaaacattatatgtatttatgcagatatactccatataacattgcaaaatgttagtaattttgaatataaatggtaacatgggtctccagtattatttttatcaaatttttggaaagtgtgaaaatggccatattaaaaaattggggaactactagtattaaaaccacattaatttctcaatgcttttattaaattatcacagcaccgtatcattataccaaattcactaattttatacatatgtatttccactgtagatcttcactgattgactctaagttttaaaacataaaataaaacaaaaaaatgtaatttactgggaaaagtgtagtaactttaatgctgaaatgtgtgtaacatttggggacagtcaatttgatcaaggaggcctggaatcaccagtcaggactcaaggaaaagatggaattatctctaggctacaaaaggaacacatagagaatagatgtgtttaagcagctgattgcatgacagactccaaagaagagcagccaactaggagcgggggcagtcataggtcagctccatgttctgctgaaccttcctcagtgtggatttcatccactgtgaacagatatctcccataaacaggttattttctctttctaccatggatgaccttcattgtctgcagataatttttagtgtatctatgcccttggtcaagaagtgtgaaagcagagacaccaagaggcactgagacatccgaagcccatgtgaatccctagtatttctcttctcttgctctcactctctccttatgtactgttcattccatctcttcacggcttcatatctatgcacagttccctccaaatcaccttcacccatccattctctggtcatctttcatagcttaggggtaagtccacctttccctgagtctaattgacaatccttggcctccttgattgaattgacctcccataaatataacacacaattcagcatcaaagttacaacaccttttctaagacttttctaagccgggtacaagtaagatccctctatgcccttcgagacagagtctttgctctctagaatcttctcttttacaaagataagtgggactaaatgaatggatacttggcaataggacagaaagaggggcatgaagaacagaaaggagaggaggctgagggtgctcacctggttgcagacaggcttgtacttgagccctggcttgttgaggatcatctccagctgcctgcggttgaagttggacaccccgatggacttggccaatcctgcatctttacacttctccacggcctgggaaaaaggaattgtgaggtgtggaagatcaagataaatgtgacacagaactgtgaaagtaacaactgtctagatatgacaataaaactagctagccgtggttcttaaaagggaaaaaataaaacagaaaattggggaagaagatagtgattgcaagagtaagtatttctgtttcctccttgggaaactggagagattagtgaaaaggcaaggaaataaatcccagtcctccttacccccaattcttctcctccacttctctcttttgtatgcctgtcatttctttttcctcactgctcacaaaaactacctttgtaaagttcctaagtttttgatccaatggtgcattttccatacttgtactaagaagataggaaacagatgtatcctacctcatctttcttatccgttctctcacctccaaacactcacctcccacgtggcacagagatccactgtgtcaaatagtatttttccattttcatcttttgggatcacttcctcacctggctgaagtagaagcagtcagtttagtgatgtcacaagtcaatttctccacacatagccatgctctgaggtacatttaaggacactaatcctccatgaggtaggtgatgcagtgctccagagagtggtatgtacagagtgtactacatatgaaggtataaggaatgtcttcaggtgacaggctccctctaatctcttacaactattacatgtataaataaatacctctttctggttcctaatggagtgtcatcattgactttcattgactttcttctgctcctataattttctctgtggcaatacctctcttcaactgcaaaagatcttgatatccagatataatggattgtactttttacccaggtgccactatcagagttctttatctccctgaacatatgatgttccatgcacaggaccatgaaccaatcatggtcaatggaggtgttttcaaggctagtttggaaattaggagatgcacaggagctcacggtaatgaacatgggcctgacagtgctccaaagccataaatgccaccaacgaaaaaggttggaacaaatacttaaaaagccttttgtaataaagcagagataagggtggagaaaggatatatttttagagtttttatcaaattcttaatgtagccctggctttgatttcccattatcatatctaatatacccttttgcattaactagcctgactagttttcagtaccttaagacaaaagttatgaatgacccaagaattcatggctaagcaaaaataaaacctccagtgtgaaaagagaggaagcagaagcaacaaggtttcccatgaaggtctgtagtttaagacactcccggactgagttctcgccccttaaaaagaggcaagaagatggaaactcattgtgcaccctatgtgcagcaggttttctggacaccacagcttcatgaaactctgtgtc

SEQ ID NO: 97386 - DNA, 13896 bp, Homo sapiens
tgtcaaaactggcttgggaatgctggaatgtacaatcaatggtgtttttatcttctgttggcatgttgtcctgtaggggttgtcctatcttgtggatgatcccctgttatctgtacgaacctccaccatcaaggtataactttttaaaaattcaattgatgtttttctctctgataattctgagtctgtggattctcccctttttaccccccggcctggttctgtgcatgtgctgctgattcttctggggctcctcctacctctgctgtcacacccagcaccagctcaggcttccagtttcttgcgctgaaccacccaactgtctttctagttccctctttggaactccccaggggcgtggaaggggtggtggaacatggcaccagtgctggtatcctgttagtctccaagtgccacatctgtctgtgccacatcccagctccgtggggactcctggtatttgccgccaggctggtctttccctgaactctgttttcatgccacttctcttcagactttctcctcactctggcagccttagccagaccatcaatgccatagatttgtagtcaacttggccaaacagccattttttagttatcctgggttcagctataccccatcccaatggcctccagtcaggagacagttagcaatcccttcccatgcttacacttgacctagggaatcctgtgcctccaggtatattaaggactcatatcccataatcaggtggggaaaaaaataattaaaagaaaccctatccgtgacagtttgcccactggccttcaggatcagtgctctcccaattctgtgaatgacccccatgtttaaaagtttttgtcatacccttacctattaaatccaggaaagacaacctagcatacccacttcccacagtcagtgactccttatctgccacctctggcagatcttgtacaaagcctggaaagtaaagtctttgcctctagctgtgatgatgccattgaattcctctgtgtcctctatgtcccttcagctcaaagctgtaggtgaagtatatgtcacatcatgatttcacaactgcagtccctaccctttgaactgatggccagggctgccaatatgattctctttctgtcctcattggatgcccatgggacatcacccctcctgaatgcttatctgtgatccgggcagctgggagcccttccttcaaggtccagaacagagacaggcagccatacagagtataggggcttacctctctcctccctacctccttttcctacttcttctccttctgcctcccgcagaaccacgagtttattgatgagcagatgtttgagcagaactgcatggagagttcaatgcagaactacccatccacaagaagtccctcactgtccagccacccaggcctcactaccacctgctgctcccgtcgtagtaagaagaccacacacctgcccaattctaacctgccagctactcgcctgcgcagcatgcaagagctcagcacgatccacatccagggcagtgagcagccctccctcacaaccaggtgggtggcttccatcccatcacccgcaaaggctcgaatcatcccattcacagaattagacaattgcagcattaggagaaccttgaggatcctctagccgctccccttatctaatgcatgagcccctctaccttcctcctttccttgcaaggaaacccaaaggcccttcatatgctgttggagtaggtactatagcagtttaggctgaaaataggtaacagggaaaaaaaaaaactttaaaaataattatatatatacatataaaataatgtgtctctagatacacaaaaatgacctgatctggtacaaggaatggaccaaccattttctcaagaaacagttttcgtatctgtgttactcatggcttatcctaggctgatttgaatcccagagactgacttttccctccccctctgcttatatttaggccacttcccactacctccaaatgcgttgcagagaattcagggaatgcaaatgccaaatgccacaaatgatagatatacaatcactggtgggggtgatgtacattctgcaattcaaagcctactatatacaacttggtaatttctggtagtttgggaataataattagaatggataattacaagttgattacaaaaggcagagatagaggcacaacaaaatatcctcctagttaccacgagcaagaaatgtagggggtcaaggaagctttgggacgctggccagcaggaaccatcatcaactcactcttttctatcccagtcgctccagccttaatttgaaagcagacgacggactgagaccaaactgcaaaacatcccagatcaccacagccatcatcagcatccccactcccccagcgctaaccccagagggggaaagtcggccaccccctgccagcccaggccccaacacgaacattccttccatagccagcaatgttgtcaaggtctccgccttgtaaaaccactggacagagggccagagtgggtagtggggaatgaaggggactggcatgttggtgggtggtcactgagaccactccctcccccctttccccactatttctgcctgccccattgtacccctagcactgagacttgtgcctggaaggaaaaagaggtagcaaaggggcacctgaggttcacgctgctagcgtggacatagccctgtgatactgcatctcactggggccagaggaagggagggagggtgggggggtcggggataggccgggggatataggctatgtgccaggacagggcctggatggaggagcctcagactcagaccaaataacagtcgtttctggagaccccagtgaggaaaatacaagaccaagagcagcaaagaggccaagttgtcacaagcaaaacaggaagaaaatataacactgtgtatttaagcacctttttcaaggctcttaatggataatatttattcatgggaaaaggtggaaaacaaaaacaccaacggatttttgtgaaatgtttttctccatggacccaacacctttgaaccaaaacaatgcattttgtgagggatttttttttctccttttatagcaaaagcttttaggctaagaagtcagttattgctgagttctctctccattcccccaggtgggtgaggtcaactgagcctgggcccccactgcccagctgacctgtgcagagctgccaagtgaccacacggcaatccttaccctttgtctgtccctgtctcccttgtctctgtacctctctgcttacccctagctgtttctgtgtccagccatctgtctctacctggatcccaatgatcctgaaacacatcagtaaagccttcttcatcactgccacgcacaacagacttgtgcctgggagttctatctgtgtgaatgcaactgcagaggaggaaagagtgaagcaaaaattgggagagtttaggggtaagggaagtctacctcacagaacagaggtacttcccttggggttggaaccactcgtgtttgcagtttcagtttctgggaaagaaagggaatgaacagatttatcacactggaatcttgaaaaggcaaatcgccaacacctgagacgcggtcaactctggtatgtgccagtgaggggagaacggaaggacccagggctcgcagcctcagccggtcattatggcaccttgctatggacccttccttcaagacccaccataaagcccatccagagcccttccaagaggccccgggagtagttttctccagagagggcagtggtacggggaccaagattcctctgacttatatcaaaccagaggcaactcccacacagaggctgtggaagggtaagcctgtgtgcctcaagaaaaatgcttcaaagcaaaagcaagtaagagattctagatgattcttacctgctatgaaagatgccttgatgtctgaagaggcttcggcctgatctccctgaagatgctgaaatgggggagaagcctcatcacctctgtgcaagcaaaggagtgaagattatttcttgaacacctggacaacatatctattcaactagcttgcaccctggtggagctgggggcagcatttctggaatcctcctaaccattgttcactgcttgtagcagagtaggtgggcctcagggttagtgacaagtcctttcctgcccttcccaacacccagccaccttgctgcagtctctgtagcctgggctctgaaatacatgagctcctcgggagctgcctatccatcctacagcttagtggttagctgtttaattgtaggccaagaatttctctccccaccacagccatctaaatgagttttactagccaggaacctaaaaacacccttcgtgggcttccctatgaccccagctcgattgaccctgtaggttcaaaaggtttcgaggtggcacctaaccagaatgtgggcagaaggcagaggagagggagccttctttctgtctttatctctttatgcttatcctcattgaccatgggctgagttctttctctgggtcccctaatgtgggaatggagtggttcttgccctctgagcttacagactaagaaggcagaaaagctttacaactacagagtacatgtgtatacacacaaccaacctaaacacatcagagaatacatacttaaatcaattcacttcatatacacatctcattagaagaccaagctaaacttcacttagagggcgggcaaaggactagaaaagaatttttctcttaaaaaaaatgagtactagagcaaaattatgagtgtctaagtatcttagttatgcttcataagatctgactggggtaagagataaagaggtaaatagggctgggcgcggtggctcacatctgtaatcccagcactttgggaagccgaggtgaacagatcacctgaagtcaggagttgaagaccaacttggccaacatggtgaaaccccatctctactaaaaatacaaaaattagccaggcatggtggtggacccctgtaatcccagctacttggaaggctgagggggaggattgcttaaacccaggaggcagaggttgcagtgagccgtgattgcaccactgcactccagcccaggtgacacagcaagactccgtctcaaaaaaaaaaaaaaagaaaagaaaaaaaaaaaaggaggtaaattagaactggttgcacacacatacaaacttcctgtgatgaatttaagaacagatcattacagggttagaatagtgacagattcaacaaaggatctgtttgatagggcaccaagggaacattttactggttcccacaaaaattaataaatgttaaatatcatgtcccaagcaatttcccatgtttttttattggtcctaatcaacagaatgttttgtgttccttccacttcacgttcagagcccacgtcatgccacttcctaaaagaccattagaccatccccttttcctccatcctccactgtagccttagccagagaaaagatccagctcacttctggtccaaaaaatgtcaacgtttggaaaatggctcatctacactacagaacacagccagatgacactgctaaagggtactgtaagaaaacacaaggtccaaagtatgctgaattggtttcataagtctaactcattggccagtgactgaaaaaccaggatatcaggattttctgggggccaatagccatgacccttgagctttcatagttcatgaaccactttgacataataaaagattcccaaaaccacctattccattcagtcccactcagcattaagagggggagggaaaaacaaaccaaccaaccaacctaacagttacattcaaatgtcaaatgaatgtgaacctagaaaatgtagtattaagagcatatcagaactagaaaagatttaagaatatctaattcattttacagtatagaaaactgagacccagagaaattaaatgacttgttcaaggtcatgcagttatttaatgacagatctgagaccagaacacgagtcttttggctattagtctaatgcattttctaccacacccactgcctctgagagcagtgatgctttggagaagatccatcaaagaatccatactgtaattggagacatagtcttatatgtcaatacgtatatgtcaatactacttggacacagcccttggaaatcacctgactgtaccaatacaaaccatactttggaaaccaccattctctgggtagaaacatctatggactatcaattttgtcagaaatcagtgaacaagtgaagagtcaattttttttagtcaaatattttctcttctcaatgaagagaagactaggacagtgacattttgaagcataccttttatactccttgtggtycttatgacagtctgtgatggtagtaggtaaagtagctaaatccttgattcagagaggggaaaacatgtggaaagaaactgaacgacttatccaagttcacatgacaagttagtggcagaaccattattgcaatccaggacttaagacatcttgtcctaggatttttcctccacattatattgcactgctctgaggcttgcttatatttttcatacctggatttccagggtggtgacgtgggggagggaagtattcarttcagaaccaccgtgaaccaagatctctggaaacaaactctgtactatttctccttcatctcctattttcataactagtgccaagctcaggactaactgcatagactccctttcaaaagaccaatagatattctcagtgacagttgaacacattagtttacaatcacacagaatttgaacagaacttaaagttgacagttaatgccgatctataattaacaaaaatgtcaacttgtggatatgctgatgattttatccagttttcaaaatatgattcctacagttcaggatatcacttattagattgtagacaaggaaaatgtacattgggacattatgtacttaagagtttttccttaagttttgcagaggaagtggttgaaaattgagctaacactagatttcgaggttactaaagaattccagttttccagtctcccacttcaattaccaggtaactataaggcaaaaatatcccaatgctgtgaacttaaggcaatattcatttcctttctacactacttggcatggtaaccatgacaaacttttattttctctttctgatttcctaatgaaatctcattatttgcaaagctttaaaatgactagatgaaggaaaaacattgttatgacccatgaccctcggagcccaaacagcaccatgaagagcatcattaaaactaagagaaagtggctatcagaaaatgaaacagctttaaaggggttccttttaagtcttgttttctattcagaatgttctgtgttttttctcaagtgtgggaatgacatttatcttagcaggttactcaactacactggatgatgtcactctaaccagtgtacggcactgacccaagtcctggggggctccttggaccaatggactattttacaaacctgggaggtgggagggatggtatatttttgataatcagacattccaatgtaatgttttccttagaggtcacacccttccccccattaatgtcatcgtgagatacatcaagtgtgttcttttctattttcgtataataaatgggctttgcttatcaacatcacaatggcaaagaagaaatatactgtacaaaactgcaggaagataaaacatgaaaactttctatgaaaaaaaaaaacacccttgagtttcctgtcgtcttcttttgaaactgtagtgcatatgttaaaacatgtatatcatttacagtattgagtcgtgtgccactgctgtacctgatgtatccaatctggattaaacaaattatgtgccacaaaccctaaaatgactgtttctttgaatactgattctcctttcctcccaaaggtgctggtatatgctagaaaatagaataatttgaacacagattggctttctaccttgctagagaaaactcacagaatcttagaagggttattaaaggcctagagtaatcttcccactccatccctcaatgtaaacataaacaactcctctatgatatcgctgatggttcttgcctgcttgtatgctgtatttgtggatgttcgctaacaggtaaagcattcgattttatctatcaacggctctattttgaacactgaccccatattattgaaagaaaatctgactttatgtatcagtactggttttactgagtaccaagttctcaaattaaaaagaaaactcagaattaaatgttctgtggggtattgtagaaagcttgggaatcagatggtggagattcaagtttaggttctagcactgaattgtgacttcccatcagtaactccctcttggcttcagttagtttcctcctgttaaaaatggagaattagagcatagtggcatgtgcctgtagttccagttacttgggaggctaaggtaggaggatcccttgagcccaggagttcaagtccagcctagggaacataataagaccctcatctctaaaaaaacaaacaacaaaaaatggggattggattagttatcttggaaatctgttccaaacttaacaattctgacttaggtgataagaccaaccggcagtctgtttcaccgttggcaatgaggagaatccttttaatttccccacaactagatccaattgatgaaaacagtaatagaaatggaacactaaaacaaatacatgatgcccaaagaccttagaaattagctgtgaaattcattttaatcattgatgctcacatccttatcacccactaggtgtcactgcagacccacagaccaaataatcttcgggtagaaataactggaaaccagatatgcattgagcaatttgtgttctttttcattaagacgcactgaatgtcaagtgagacatacgtgcttgtgtacagaggtacaaaataataaacacattctgccaaaataagtcaataaccttgcgatggagttctgtcagctagggttatcaaaaatacatatttttaaaagactaatgtagatttcatttaagggggaaaaaaacataaaacttcatactactccctttgtctcatacagagtgatccgcaagtactgtatgttcaattatttttagtattcaggggctgaactttgcctttaaaccacattttaaaaggttaataagtattactgtaatacctaagctactttagaaaatattacctttagtcatccaaaataattcatattctaagtcagaattattcaaagtagcaggtttctcaaatatctcgctacatgttaatattgctagcctaattcaagttacagcttaacgtgaatagttgcagtgttaatgatttacaagtattcacaaattcagacatttaaccaattcacatcagccttcgtccaaattacttgaatttataaaggctttctgtatttataaatttgattatccttttcctgaactagaaactattttttcttcagcatatgtcatataatcatagaactagaagggatcctaaaaatcttctagtccaactttcattttattgatgagaaaactggaccatgagaggttaaatgactggtacaaggttaaaaagtaggtagtagcagtatcaaccaggacaagtacctttttcacaccaccacagagccttctcaagtgaatctactgtaaacctctctatggttcctaacagatgatggaaagatgcacctagactgacaatcaaaaaaaaaatttttttccacacaaaggtgagtcacacacaaatagcagtatgtggaagatcccttccacatccacaactatagctacctgttagttgagaaggtggcagctgccattttcctggtaaatgcttatggaaattgaagcaattagtatttttgtatgttatacatatgcttacctccagcttatttttgtggggaaaaaaaagcaagcacaaaatagagaatccaattactctgaagactaatgggtaacctcgtctctaattaagatgaggcagtaccctaattaaaatcccccagcaatgacaaactgaacttggctgtattgtgggggaaaggatggaaaaagtaaattcaattatatatcaatgacaggatcttatttaaatgtgtaattaaaatctctacttcttaatgacatactggacctaattatggatttgctatctacattattaattaattcacatactgacacatgtaagaaaagcctaatattgcccaatccaaatgacaggaatccaagttaagtaggattttagaattgtgttatgtaggtgttggacaataaatgacaatggctgtgggtgtttgctgacagccctggggaaagtgtttatactacctagacaagtatgtacacaggaaagaagagctttccttttaaaaagtgaatacacatctctctacacaagtggttctctcataaaaaatccagttcacagaaaggcttgggaaccaaaagcttaatcataaaaggatttccagaggaaaaaagcaaagaatatgtaatttccaattatatttttctaaatcgtaatttacagatgcatcagctcagatccaagctcctcttggatcctaacattagaggtaaaaactggggaaaattttctagaagacacaaaattaggatgtactaagaagtgtctgaagagaatcaattccagcttccacaaaatacttaaaactaagagctagaacttcccctagcctaccagcagagcaggtcacttgttaatctggactgtatagatgaacttcagagggtctatgaaccccttgaaattacactcacaattctgtgcttatggaatgagaaatttcctgaagtcaatctatagctatcagctgattcataaaaggatccaagaaccaaaaaagattaagagctgctcctctatctgagcaacacaagtaagacagcaactgatgacccacagctatttaatacacagcaaaaatgtggacagctttcacagcctcaaaagacattcaaaagataaacaacaaacatgtaaatatatttaaatttgtttttactaaaaacaaatatttttactggaagctaacagatcaaatcaaatacctttaggaaaatctaaagcaatgtttaaatattccttcctgcctaaaacctaagaggattttctgatctaccatgctacaaatttctacaagaatgcacctctatagaaggaaatgcagcctaagccctttgtaaagaactccacagcaataatattactaatcaaatctattgcttttattgtttttaagtaagtggtggtatatgtcatctttttaaatgtttcttttgggaagatcttatagaaaatggcaccctgaaactttcagctctatgtcccaaaaattatctttcaacaatctgatgaagtttcttaaagaaactcttaaaaatgaagataatatacctggcctaaatcaaaacaatctgaaaaatggatgtgtcccagtggaaagactcaagtcttttcaagtttatcagaaatgccactatacaccactgtactataagtcgaggaggatggatatccaaaggtatcatttgttgacagttcctgatggtctcaggtatatcctataatcactggttactatgcatcatttcttgtagataaatggtattcatgtgataagctgccatccaacttggatgtctctgagcattccaataatatgaatgagaagcggcagcataatattcttgccatgccctgtagtaagctctccagtactcctcataatcctgataggtatcagaaaaactcagacgtatttccctatgacagtcataccaatcatcttcctgggcttcagtctgcaatctgaaggaagaccgcctgggtaggtttctccggctctgcttagctctctggctagccccctctttaagtcttgtcttcatctggattccaggtgattcttgatatttctctggattgggggtgtcacttccatttggtggttgttccaaagaaatacgatcatccacaggcgtagattcagagtctttcagctgattatcagaagagccttccaagtatgacttatttcctttgctctgggaagaggttcttgagctgtaagaatcactgtcactctcagagtctccagattggctactacttgccaatacagggactctctgttcagtaactttatttctcacaaaaccattttgaggattcacagtctgatccccagggcctgtgtagtgcctgatgatttccacaggtttctctaacccctctttaatataatgttcataatcctctaccaattcagcaaaagtcaacgtgtatggctgatggattttaaaggaagacagacaaggaatctgggggagtgacacaggtaaagcttctttgacctggtgctgactgttggtggagttttcaacgggagtctgaacagaattcttcatttgctcttcggattgcctgtcacagcccagttcttttggtgacgttgctttttctatgattccacattctgagtggcttttcacaggaagcttttgtttggtattattttttgatttgactgatagtccagatacagaattatttctagaggaagccatgtggtcaccatgagctttctgaatttgaagggttctctctattttctgaatttgcttttttaagggttggttaggtacacttgctataccatatgtatgcacagcagctttaacttccacatcccaatccacacattcttccatcagaccagaaggaatgggatctacataaaaaggaagaaaaatgtattaaaattctcaagctactctagaccactgttttctgaatgatttcataaagttttctatgatcaaatacatttaagaaacaatatgcaaatatactaagatgtttaatagatataacatttttaaagactgaagcaatcctgtaataaagaaacctgcctaagaaatatgtaagacccatcccatactcacaagcactatctcccctcactctcactagaaaaagagcttactctaggagtaatgtacaagcctgcaacaattctcccatcttttctctcctccctctccacagcccctcccctttatctcaatacttctgacagcaaaacaagatattagaaaatggattgtgctccccaaagcttatcaactaggaaataatacaactgcaactctgtacacccaactaaatctgtcacccaatattccaacagggagaaatcactgcccttaacaataaagagaaaacctctataggggaaaaaactagatgactatgaaaagatctgtgactatgaaaatcagaaatgacatttctaatttttaaaaaatttgctggcttcaaccctctaaattttctattccatccaggtgtgacaatttgcttcccacactcagacctttcaaagtgtgatcaatttttgtcttaggcagacaagatatatcaagcccctgctttacaaagatcttgcctgttgttgctatttatgctccatgttatctataaatcccacaggtctggatacttcaatgaagtctcttgatcctttgctgaacagattctatgattaaaactctcattcctactcagttgatatcccttgcttgcctagtcctataatacaggccaatttccctcctagttctgccccaggaaactcatctgaacatctgttgttacacaagttcccagtccaatacagacctaacagcatgaatatcattttctcatgatttcagggccctattaacattacataaagatccaaatatatcattttccagtatccaaaggcaatttttatcactagatgc

SEQ ID NO: 97387 - DNA, 30944 bp, Homo sapiens
  misc_feature (1)...(30944): n = A,T,C or G
nnnnnnnnnnnnnnnnnnnnnnnnnnnnnnnnnnnnnnnnnnnnnnnnnnnnnnnnnnnnnnnnnnnnnnnnnnnnnnnnnnnnnnnnnnnnnnnnnnnnnnnnnnnnnnnnnnnnnnnnnnnnnnnnnnnnnnnnnnnnnnnnnnnnnnnnnnnnnnnnnnnnnnnnnnnnnnnnnnnnnnnnnnnnnnnnnnnnnnnnnnnnnnnnnnnnnnnnnnnnnnnnnnnnnnnnnnnnnnnnnnnnnnnnnnnnnnnnnnnnnnnnnnnnnnnnnnnnnnnnnnnnnnnnnnnnnnnnnnnnnnnnnnnnnnnnnnnnnnnnnnnnnnnnnnnnnnnnnnnnnnnnnnnnnnnnnnnnnnnnnnnnnnnnnnnnnnnnnnnnnnnnnnnnnnnnnnnnnnnnnnnnnnnnnnnnnnnnnnnnnnnnnnnnnnnnnnnnnnnnnnnnnnnnnnnnnnnnnnnnnnnnnnnnnnnnnnnnnnnnnnnnnnnnnnnnnnnnnnnnnnnnnnnnnnnnnnnnnnnnnnnnnnnnnnnnnnnnnnnnnnnnnnnnnnnnnnnnnnnnnnnnnnnnnnnnnnnnnnnnnnnnnnnnnnnnnnnnnnnnnnnnnnnnnnnnnnnnnnnnnnnnnnnnnnnnnnnnnnnnnnnnnnnnnnnnnnnnnnnnnnnnnnnnnnnnnnnnnnnnnnnnnnnnnnnnnnnnnnnnnnnnnnnnnnnnnnnnnnnnnnnnnnnnnnnnnnnnnnnnnnnnnnnnnnnnnnnnnnnnnnnnnnnnnnnnnnnnnnnnnnnnnnnnnnnnnnnnnnnnnnnnnnnnnnnnnnnnnnnnnnnnnnnnnnnnnnnnnnnnnnnnnnnnnnnnnnnnnnnnnnnnnnnnnnnnnnnnnnnnnnnnnnnnnnnnnnnnnnnnnnnnnnnnnnnnnnnnnnnnnnnnnnnnnnnnnnnnnnnnnnnnnnnnnnnnnnnnnnnnnnnnnnnnnnnnnnnnnnnnnnnnnnnnnnnnnnnnnnnnnnnnnnnnnnnnnnnnnnnnnnnnnnnnnnnnnnnnnnnnnnnnnnnnnnnnnnnnnnnnnnnnnnnnnnnnnnnnnnnnnnnnnnnnnnnnnnnnnnnnnnnnnnnnnnnnnnnnnnnnnnnnnnnnnnnnnnnnnnnnnnnnnnnnnnnnnnnnnnnnnnnnnnnnnnnnnnnnnnnnnnnnnnnnnnnnnnnnnnnnnnnnnnnnnnnnnnnnnnnnnnnnnnnnnnnnnnnnnnnnnnnnnnnnnnnnnnnnnnnnnnnaaacatttcgttgaaagaataggagtggatctggcaagcttcttggaggacaatgtgtgtgttaaagaatctgtagcatgatgagaagccaaggcaccggtgggaggaggggagttgcaaccaattcattaaggctggagagtacgatgccagtggagcagtagtggttgatgtggctgggaaagaggtaggcaggagccaagacatggaggttctattatgccatgctcaggttttagaataccctgtaggctacactgaacccactgtggtctttcagcttgggagtgacgtggtctgatttgcctctagaaatatcaccctggaagctgtgtggagaatagaacagagaggattgtgtgtggagaatagaacagagaggactgagattggaattagaaagctgctgtattataccagtcaagaaatgacagatatctcaactaagacaatggcattggtagataagactaggggacagagtccataaaaagtttaggtagtaaaatggcacacagtagacactcactacatattactcatactggcgaacctagctggagacatgataattcatgtgctcattcttcaaaaaatattgaagggtagtgccaggtatactgtgttaagcattgagacaacaccaacgagaaatatagatcagatccctgcatgcagtctggcggaacatacagacaaggagccagacaatgacaacactatactgtgataagtgctatgagaggggaagttcaaggtgctggttatagtttggtttgtttgacccctccaaatctcatgtggaaatttgatacccagtgttggaaggtggggtctaatggaaggtgtttgagtcatggggtggatccttcatgaatggcttggtgccagcctcgcagtaatgagtgagttctcacttgattcattcccacaagagctggttgttaaaaaagagtgtagcacctcccccccaccccaccttgattcctctctcatcatgtgatctctgcacttgccggctccccttcaccttatgccatgagtggaagcagcctgagaccctcaccagaaaccaagcagatgccagcaccatgtttcctgtacagcctgcagaatcatgagccaaataaacctcttttctttataaattacccagcctcaggtattcctttatagcaacacagatggactaagaaagtgctgtaggaacacataagaggagtactttacacagacgtttggggttggggaaatgttcctggagaaatggtgtccaatatgaagcttgaagaacgagtacaagttagccaattggaaaagcggggcattggttggcaggggaggggagtggcgatggggaagtgaaaaagctctagcatgactccacagggatagagtgaggtgaccacagactttggagtcattcctggacaaatgggatgaaggaggaggtctgcgtatgggtaggaagatgagttcagtcttgagcgtgtgaaatttgaaatgcctgtgggatatccagatggagatgaaggagatttggcttaggagttcaggagtgaagtcaatactgaaaatacagatttgcgactcatcagggtagttcttgaagccatgaatgtagttgagaccattcagggagagcacatagaatatataaggggaccaaggacaacttcttttaaggggcaagcaaaagaggaacatcattggaagaagactagaggagtgtctccacagataaagttggtgcggggtgggggggcacgctaaaagataatcaagccagaaagagatgagagcaaaggtgcagaaggaagccagaggaactgaagaagaagggacaaactcagaaacacttgctgagttccaaaatgataagcattaaaacctgttcactgagttaagcaatgcaagtgttgctgggggccttggcaagagcaatttcagtggaggggctggaggcagaaactagaccagacttgtactaggagctcgtgagaaattctaagacatatcttcccaatactgggcagcatgataaatgtccacattagagagaattggtgagcaggtcatgctcagccaaggcattttacatgcctagtggaatctcatgcaggaagcttctctaagcgtagaggtaagggtaggtctgatggcaacaatctctcttacttttccttcttctgcgaatgtcttgatttcccctgcattcctgaaggtaatttcactttgtagacagggttctggttcttttgtttcgccacttgagaagtgttatgccacttcctctggcctccatggtttctaatgagaaatatattgccattctaattccttttcccgtataggtaaggtttcctttctctctctctctgcttttgggacttttttcctaggtccttagttttcagaagtttgactgtgatgcttcttggtgtaggtttctttaagattattctgtttggggttcactcagcttcttaaatgtacaggcatgtgtcttttgccgtatttagaatcttccagccattatttatttgaatactttttcagtcccacccccttcctcctttccttctgtcactatgatgacacaaaaggtagctcttttgtcatattcccacagatccccaagtctccactcatttttcccccagtcacttaggctcaggccacatgttctgaccgggggttttattgttagttccatttcaaagcctttgcaatggtatttggttctgttaagcatgatcagcagtcttggagctggcgaggtctatatcccttactcagtgcagttctcaaagtcctttgtatgtcgtacaggatcacatctgtacatacacaccttgtggggtaagcccagaagctcatacacagcttcatgggtttactttcccaagcacttcctccctccctgcaatctccccagcactttctgcttccctcagcttccccttttcaaccttgtagccatgaagctgttgctgtcgctttagtgactcttctctgccacacgcttcctgtgcctttgccttcctctggtgtgattcggcaggaagaccaaagaggggaaaaagaagtcacgggcacccctttgggacctacaatcagagaggaaggttactttccttcagagctttaatcacctgaaggccctggcggctgccactgtcactgtcactgcctctgtcaccaccactgctgccacaggattgcctgtgggctagaacatgaaagtacaaagaaaagaagaaagaaaaactggggattcccttaactatcgctgagggttagtattcccttttccctcttctcaagtcagaaccagagctctctctgttcacaccactgtctacttctaacttgcaggctacgttgagccaaggatactaaaggggggaaaatgtcaaattcactgctgtttcagtggtgcttcaaattgtagtctttccccggtctgcctccttccatttacttttcagagtcctcaaatagctggcccatgcactgtgtccacattttatagctgcattcagtagagtgtgcatgcttcatctcacccaggagcagaaacattctggagatgttacattttacttttatatttaagtggaacaaatttgttcccttgtaagtaattgatgtgtgtgtgtgtgtgtgtgtgcacgtgcgcgtgtgcacgcgcgcgtgcttaggtgtctttaatttaaagaatttaagaaattctttaattttttttgaagtaccataacacaactagaatatatctcaatattgattgttctgcatcaatttttgatggtagagactttgtcgttttgaggagcaggttcaattcttcctttatttctggaaacttttcacatatggcatctgtggatatttttctatcccatttattaggctctttacttaaggcatgtaaattatcttaatgttggatcagcattagcgtgaccatctaaagtccttcctccatgcccttgtttcgatttgtgtgcatgtctcttctgcatcttgctcttcctaatttacttctttgatccaccatgtggttctttgagttctcggtttcttttctgagctcagtaatctccttttttaaaaaaaaaaaaaaatcatattcggttgccaatcatctggtctttgaaactttgttaagttgaaatcatattttaaattttactatggcttagagaactctagggttagttgcacctgttccttgttttatgcattcttccagtctgtgatggttatctgtcttttgtatactatgatggtttctttctttctctttcttcttcctttcttctttcttttttctttcttcttctttctttctctttctatttccttatttcttttcttctttttcttccttccctcctcccctcttctctttttccctcctttcttccttctttcttccttccttcctccctccctctctctctcctctcttccctccttttccctctccctctatccctgtagattgttagcatcattgctaaaccatttatttttatttcaattatggaaaacattgtcagacgttctatttgctctaacattctgagggtgataatttgagggcaggtgggatgttgatttcaatctaccttttcttctaagatcttgctaaatatcatgtatcatgctctagtccatccatgcaagggtgtgtcttactctgagggttttgttttgtttgcccaactcagcacggtgtcttggaaaatggaaagaattgggagccttcctaccgctggtgaaatctaggagtggcagttgagggcttctgttcacaaaggtatttacttttttctgcttattctctcagtccatttctcctcaagttagagagccttacatcccattctcaggatctgactggctcacattgtttttcctcagtattgcttccagggggtggggacagaatgagaagtgtgctaaaccagccatcctccccacaagaatttatacatatatatatatgtactataaatatatagtacatatatatatatgtactataaaataatacatatatatgtactatatataatacatatataaatacatatataaacacctatataatatacatgtatatatgaatacctatatatttatatatatgcatatatatgtatgtatatgtatatatgtatgtatatgtatatgtatatatgtatgtatatgtatatacgtatgtatgtatacatatgtgtatatatgtgcatatattatatatgtatatatttatatataaatgtgcatatatttatatatataaatctgtatatatttatatatataaatgcgtatatatacatacgtatacatttgtatgtataaatacgtatatatttgtatatataaatacgtagatataaatacatatatgtatatttatatataaatatgtatatataaatataaatgtatttatacttatataaatacatatatatgtatttataggtatataactacatatatatgtakttatagttatataactacatatatatgtatttttagttatataactacacatatatgtatttatagttacatatatatgtatttatagttatataactacatatatgtatttatagttacatctatatgtatttatagttacatatatatgtatttatagttatataactacatatatgtatttatagttatataactacatatatgtatttatagttatataactacatatatgtatttatagttatataactacatatatgtatttatagttatataactacatatatgtatttatagttatataaatacacatatgtatttatagttatatacatatatatgtatttatagtgaaatacatatatatgtatttatagttatgtaaatacatataaatatatatgtatttatagctatataaatatatatacgtatttatagttatataaatgtatataaatatatacttattgttatataaatataaatatatacttatttatagttatataaatatatataaatatatacttatttatagttatataaatatataaatatatacttacttatagttatataaatatataaatatatacttatttatagttatataaatatataaatttgtacttatttatagttttataaatatataaatatatacttatttatagttatatacatagataaatatatacttatttatagttatatataaatatatacatatttatagttatatataaatatatacgtatttagatttatataaatatatataaatatatacgtatttatagttatataaatatatataaatatatacgtatttatagttatataaatatatataaatatatacgtatttatagttatataaatatatacgtatttatagttatataaatatatataaatatgttcatatttgtagttatataaatatatataaatatatacgtatttatagttatataaatatatataaatttatacgtatttatagttatataaatatatacgtatttatagttatataaatatatacgtatttatagttatataaatatatacgtatttatagttatataaatatatacgtatttatagttatataaatatatacgtatttatagttatataaatacgtatgtatttatagttatataaatatatatgaatatatatgtatttatagttatataaatatatatgaatatatatgtatttatagttatataaatatatatgaatatatatgtatttatagttatataaatatgtatatgtatttatagttatataaatcaatrtatatgtattgatagttatatcaatatatatgtatttatagttatataaatatatataaatatgtatgtatttatggttatataaatatatgtaaatatgtatgtatttatagttatataaatatatataaatatgtatgtatgtatagttatataaatatatataaatatatatgtaaaatatatgtatctatcgttatataaatatatatgtatctatcattatataaatatatatgtatctatcgttatataaatatatatgtatctatcgttatataaatatatatgtatctatcgttatayaaatatatatgtatctatcgttatataaatatatatgtatctatcgttatatmaatatatatgtatctatmgttatataaayatatatgtatctatagttatataaatatatatgtatttatagttatataaatatatatgtgtttatagttatataaacacatgtatatttttgtatttatataaatataaatacatgtatatttatgtatttatataactataaatacatgtgtatttatgtatttatatttatataaatatacatgtatatttatgtatttatatttatataaatatgcatgtatttatatttatataaatacatgtaaatatacatgtatttatataaatagatagacatatatttatataaatacatgtaaatattcatgtatgtatgtttatataaatacatgtaaatatacatgcatgtatatttatataaatacatgtaaatatacatgcatgtatatttatataaatatatatgtaatatacatgcatgtatatttatataaatatatatgtaatatacgtgtatgtatatttatataaatatatatgtaatatacgtgtatgtatatttatataaatatatttgtaacatacatgtatgtatattgatgtaaatatatatgtaacatacgtgtaagtacatttatataaatatatatgtaatatacatgtaagtatatttatataaatatatatgtaatatacatgtatttatatttgtatctatatatgtaatatacatgtatttatataaatacttatataatatacatgtagatatacatacatgtgtaatgcatgtatgtatattcatataaatatatatatatatattcctgggaagccactttcctccctctctccctccttctcctgcttctcctccttrgtcttctcttcttctcctccttagtcttctcttcttctcattctgctttttaccattatttatgtattattttttaatttatttagtaggatcggggaagggagattcttttatctttcttcactctgccatcttttacaaataaattgtaatgttactgactccaagttaagataaaagtttgcttgcttgaatgtgattattgctttgcttgagtttgtagattattcactaaaaatagtctcaggaaaacaggaccttcaacagagataaaagaaaacacgccaaccagcagctctgggaaggggctgaccagcctggtaagaataggctgacggtgcctgtggaaggtcacaaaacaytgaccaagaaagcagtgattaactgcccacctgagactgaacacgttttagaagaatgttttgatcattatttcctctgctttcccttaaaaaaccctaatccagaggcacaactcagagaggtgatcactgaagtctagttcactgactcctcccggttgctggcttctcaaataaagctaactttcctttcaccaaagctcctctctttgagtttttggccttcaggtgatgaatggcctggaccggagttcagttacaaaatctctggttttgaagggttatttttttattcctgggatatattccggctgacttggagttagttttagataaatgtaagctttctaatggatctgartccacactaacggatatgaaattatcaaggtctttttatttttaatcgcaaacacttcattttatcaaatcttaatcgtctccaatttcaccgcaaacaatgcaaggaccttgtcttacaagtcagtgctgtccagtatttagttataatttggtcagtcatattgtttttatgcagtcttttttttttttttttggactcatggccatggttactagtttctttgttcaccattcctctgttgcatcttgctttgttcttttcgttcaatttccttttaatggaagaacatctttaagtcgttctttcagtgagggtttgtgagtggtcagccctctcaacctttgttgaagaatatctttactggctgggtgcagtggctcacacctgtaatcccagcattttgggaggccgaggtgggaggatcatttgagctcaggagttcaagaccaggctgggcaacataatgagactttgtctctacaaaataataaataaataaataaatagccgggagtggtggtgctcacctgtagtcccagctactggggaaaaaaaaaaattagccaggcatggaggtgcacacctgtagtcctagctactagggaggctgaggcaggaggatcccttgagcccatgagatcgaggctgcagtgagccatgatcgcaccactgtaccccaacctgggcgacagagtgagaccttgtctcaacaaataaataaataaatattttaaaatatatcaaaaagactatctttatttcactcattcttgaattgtagtttagttgggtatgacatttccccccattccccgaatgcattagtgatatgattccatttttattgcagttggtgagaagtctgctgtcagtttattatccctttgatagcactgtgtcttttctttctggttgattttaagatctttccccttttctttgttgacctgcrccggttcccctgtgattcagttttattgattcttgctgtggctcatgcttttagaatacgaggaactatgtctgttttcaaatctgaaaatttccagccagtatccttttgattattggtttacccctgctctctttattctctgattctgtcattcctattagagtttttttggacctttgcatcatttttctgtatctcttaaccgtttatacatttgctatctctccttgctgccttctgaataatttccttacttctatcttccagttcactaaagcagatgaatctgcttttaaacccatcctctgatcttttgctgtcactggaaataatgtctttcattttcggaagttctatttggttccttaaagaaagaaaccggcctcttctttttccgtagaatcttgatctttctcatatgtttggattccttattgtttctaagtatcttatacaaacttattttatactctcggttggctctattatctaaagtttttggtagtgtaatcctgctcatcattgtgtttgctgatactcaatcacaggcggkttttttttttcctcaggtgttttataattttgtttgtgagtttagggatttgttcaaacggcttcatctgtgtgacttcaatgaggtttgactgggggtgtatctctggctgttatctttttgatgttaatgtgtaagcttggggttttcaagacctaaataagaggtattaattccaaccctagacctacatgacaatagccttagagttacaaatgaccaggggaagcattttattttctcccaccagaacccatgaagaaacaaactctcttgtcatctcaccatggtggtgggaagacttttttttcctagtccatcctttcactgactgtgtagcccttgtgaggcaccaaggcttttctcctctccctggtggttattgaatccattcccctaccaccctaacataaattcaaatgcccattgatctgctctttaggttcctctttgttttttgacacctgagggtcaacttccaccataagttcatcacatgtgcattaaaaggaatatttattaaattttatcctgccttttaaaaggtgctttgtaacaggagggttttcaggttatctagtgtgcactgtttccagaaatggaaattgctttcccctttaaaactcccagagcactaagaagctcccacaaattctctggaagaggaatgtgatgggggcgggggaagacttttcatgaatatgtagcctcaaagaaagattggtgctttggggtgccagacactcaatgacagcttaagatgagtgaggaagggcctaggggttgaaagagccctaattgctcaaagccacatgtcacaagaaattttgggaagaagagccactttatgaactggttaccttcatggatttttcttccctaggctcagaagtggaaaaatatgaagatccattgctgatgggaatcctgccctaagcaaacggtggtgagacatggctgcttttagtgcatttattatatgtgaccatttaaaagcaggtactgaaggctgcagaaaagtcacgaggtggtactcaaaatatggttatataggtaactgggtgtggctcttccctgaggcacaaagaactgattttttttgtgtgctctttgaaaggaaatgtataaagttggtattatgctttactcagaaagtttttaagagggttgggagtgatgcaatcactttaaaatgatatacaaggttgaacactctgctaagcttcaggtaagagtatccaattgcctcttggacttccctgcctggatgttctgttccacgtgcaccccaaactcaaatatatccaagactgaaaacatcttctctccaagctctctcctcttctaatattccctgtgtgaataaggtgtgcccagttgaccaaaccagtaacctgggagtcatcttgacaacttcctctccctcaacccctctctcgcaattaattggacaccaagttcagtggactctaccttcaaaatgcctctcaaatcaatccacgtctctccttggcattgctgtcgggcagcagggcccaggttcccactcctcttggaaatgacagaggtctcgcctcttctgcaccttcccccgagcttgaggatctatcctgtccagaagaaatcctttccctttcatatttctatagaatgctgtctaacactttgaattcccttcaggctctgggtttcagaaatcaacacagaaagaatgccgggctattcatttccctccaggatgaagttagaatcttgagggcagcgaggaaggcaggcatatgcattgttgcaaaccttctcaagtgattcagatgtgcagctccggtcaagagccactgcacaacgtggtgagctatttgaatacagggaccatgcctttcaactttgtattcatcaaaacacaacgcagccaatacctgatatagaatcagtgctcagtaaatgttccagtgaatgagtgaatacaagaactaaagaatgatatggtgcaaagaaatggatgaaagggatcttacgagctacttagtgcaatcccttcatttttttttttttcagttgccgtagygttgggattgcttgaggctcccggatgttcacaggatgtcatttttggcaaccacagaccactagttacccagcttttttaggtgttgtgtagcaaggagggatttcgggttatgtaatctgcaatatttccagaaatggaaattatttctttttccttttatgactcacacaacgtcaggaaatttccacaaaattcccagaagaacatgatggaggaaaccactttccctatatatattttagtggaatatattttattttaatggaactgccagtgaagcagtagatgtggccagcagacactgctttcctggtgtctcctgagaactcttttctctcattggttattttcacctgccttcttctgcaagttcctttttgtttgggctcattttccattttctctgtatccaggtttgttgaaaatgcaggagccagtgcttcccaaccttccctactccaaacgcctatgcacacgcacccacttgcatgcgtgcacgtacacgtgcatacatatacacccacacgtacatgcgtgtgtgcacacacactcctggactcttgagaagctttcaaaaggaacttatagatagggtgaggacttttactattaattattaattattattattattacttatatctgaaatataacattttggacacacggaagtgctctaacccccaaattcctgtttgtctctggaaaggagcaggcagtctaggatgggcagggacacacaagacaacttatcttttgccatatgcattagacctaaagtatttacaaagcaaaagaggcagctgtggcgagacagaaaaagccctggattcagaattaaaacagctgggttagagtactggctctgtcacttgctctctaactctcagtttcctcatctgtaaaatcggggcaatggtactacttcatattaatacaacctcagctgcaaaagactggtttaggtacccttgttctgagctcccacagactccttgtgcttacctggtgttaacattggctgttaatacatgtgtctcccgtggtacaaggagatcttgagggcagaaattctatttgtctggcctccagcgtgcctgccctcagtgcacagcagaatggtcaatgaatgttggttgagtgaatgaagaacaatcggacatttgcatgtttttgtgtgtataattcctgttgtactatcatcggtagaccgccaggatagtacaaatctatttttattgtatgtaaatttgacatatagacattccaaattaacaggagttgattcgctccccatgttacctaacaactagtttcggaatgttgttggatccctttaggagaatatttcagtacatttgctcccctggttagggttaggggttagggttagggttagggttgtgttcccagcacaagcgtctcctcaataataagccttcacgtgtgtgcaccggcactttaaagagttgttgttgttgttgttttaaaggtgttttctcgtacactgacttatatgctcctcacgagaaccccatgagacaggcaggaaaggtgttcctgctaccacttgatggatgaagaaaccaatgttcagagacgttaactgagtcactacacaccacatcaagagcaagtttgtttcagagctgggcctcaaacagaatcgggtttctcatttcacagtctggtgttttttacacaatccatttgttcaacccggctgcaatttgtgatgttgcttcagtgatattttttgcatctcatcctattcctgcttcacaactgcacctcctaccacttgcctcagcatactctcaaccggggcttctcaggtgctcaaccagggcctctccctctaccctgaacatgtcctcttgcaatttcctgcctctggatctttgcatctgttttcacctcttggtgggcaccccttccccacccccacgtcactgcaggttgaaagaaaccctaggcatcctctcggtttcaactcaaagaccacctaacttcatgaaacctctgcagatgggccctgctggatgagatctctctgcccttgaatgcacagagcagtccatgtcttgttctatatccatttccatacctgcttcattcccttctctacagtgtcccttgctccgtgttctcacagccccctgtgctcagttttcacagcacatattgccctatgttgtgagcctgctttcgtcctgtgactgtgagctccttgaggactggaaccttgtctgacttatctcggtatctccagcacgcagcacagtgccggaacacagtagttgctccaaaaaatgttggatgaatgagtggatggatgaatgaacactaccccacacaacgccttggatatagtggctgcaaaataataatggatcaaattgagtctataaccagatctcatttcttttcatcctatctcagtgaaagatgaaggtgctttcttctgactcaggctgtcacttccactcctgctctgggttcgatcccatcctgcctccccaggtgcctcactccatcaattacctcttctctcaagaatgtctaatctctccgtcttctctgcctggctcctttccttgcagtaactaaaatgctcaggtctctcctcctattccaaaaataagtaccctcaattgaatgggtgtcttcttcctcacagtatcaagatatgtacctcatcggggagtaacccagctgagtgagccctttactggggagccttcagtgtgagtctccttagatctttttctcttaggttggtcagatggctcacagaagactcttccagctgccagaagtttaggggcaggggcagggaagaagactgggagttcacagctttcaggacacatgcttccactcaacacccctgttttcagtacaggaccccagccctcaactaagtctgcgaactccccatccagagaccctctgctttaccctctccagggaataacactccaggcttctgtcagagcagggaagggccagcccctcactggcattgacagcaggaggggatttggcaatgaatctacttcttaaaagagttttcaaacagccttcattattttgatacccaccccccttcacttccagaggtaactccacttccagagttaccttggtccagcctttgaagattcctgggggtgaggagtaaatcaagttagctttttgcttttcccactaaggtctcagaattcctagtttgtggccttcttggatctgctaagtcagttgccactcatccatctgttcttcagcatccaaaatttagttgttgcctcctttcctgttcttcaaccctttttatttcatcttcactcctatccttctaatcctttcaaaaatcacatttgtagcagttccagtggggttttgggagatggtgaagttagatgtggaagtatgtgctccaccttaactatgcatcatcacgagcatgggtgtctgcctgcctgtctcattgattctacacaccttcattaccacaccactctccctaaaactctccagactcagcttttctcatctggctctctgacctgttccctgaccattctgttctttcagctctcagccttcggactgccaaaaccccaagccaacttcctatccaggaaccctccggcctagaagttcagatgtcttgccaatatatctgtgcttcacaacttgcctactctctctgacccctaacattttcacatacttttccaattctgcctgtcataaatttgctgcttccccctaagtagaatgttgattcctgtcaaacacacagcctagccctgattcctcctcttctctcaagcagtgatattgtcaacaatgataaacaactactatgtactgagtgtttttttatgtgctgctcacactttatacacatgtatagattcattcttcatcatagatttttcagctagctggcatttattagccccactttgcatatgtaggaacacaggctcaaggaaagaaagcaacttcccacaatttcccaggctagtaaaagtcagagatggaattcaagcccagatcattccaagtttgtgctcttcctgtgacacgacactgcctcagtcaaggcatcagagaggaagttagaaagcagatggtgagagggagtacctgaattggagggagtacctgaattggagggagtggccaccatcagtgggtagaccatggagaaagatggggctaacagagaaaaaccttcactgagttcacagttttacacagcattagcccttgtgatctttagtcgtgcaggggataaattaccgtgcctgcctgcccacacagaaagtaagctagaacaccactactaatctatatgatatacaccaacatggcttaagacgatttattgcaactgtaaaaaaatgcgcccccccccttttttttccagaaaggaagcgtggattgcattaatcaagctaaagacttttatacttctttacagtctgacacaaaaacagacagtcataaagataagcccgaatcatcaagaaagtgcacagtagtattttgcaaacccaatttagggaatcagggaagagtaaaatccacatggataaggtttccccttacttcccattcgtgatggtacagtgagttcatgttatggaacgcccactgctccaaacacatggcaatgatggacaaaatataaaaaggtaaactcaaaaaggcatggccaagacaaaacaaacaaaacaaaacaaaaacaaaagataattgtctccatgttgaagtactaggcttgttgctctggaagcaaaccatggtaaccagaagctaagctcctgcaatgtatagcggttccaaagtaccctgagcaagatggaagacaaaagccatactcacagattaaagcccaggactagaatggagctacccacaaacccaccaacccctgactgtaagtctgacaaaaaagaactaccaccaaactctgccagggtctttggttctgatgagctgcaggcttaaggaggtgaggatgcagacatgttctggyctcgtaactaagagttgagctaatccacagctgagctaagtgagtggatttccaatatgcccaagagcaccctggggccagtgatatggatatgttctatcaaagggttttgagcctaacaactgactggtatttttcaagagaaaaaacagtactgaataggttaatttccttccattcttggaagaggcaaaattagaaatgatgaattttttttttttttttttttgagacatggtcttgctctgttacccaggctggagtgcagtggcgtgatcatagctcacagtagccttgaactgctgggctcaagagatcctcccacctcagcttcccgagtagctgggactgcaggcactcatgactccacccaactaacttttcttttaattctatttttttgtaraaacggggtcttgctttgctgctcaggctggtttcaaactcctgacctcaagcgatcctcctgccttggcctccaaaagtgctgggattacaggcgtgagccacggcacctggctagattttgcttttaagtttgaaatgctttatttagagtttattagccactaactcctttttttttttttttttaaacttttaagttcaggggtacaagtgcaggtttgttacataggtaaacttgtgtcataggggatttgttgcatagattatttcatcacccaggtgttaagcttagtacccattagttgtttttcttgatcctctccctcctcacaccctctatcctccaaaaggccccagtgtgtgttgttcccctctatgtgtccatatgttctcatcatttaactctcacttataagtgagaacatgcagtatttggttttctctttctgtgttggtctgctaaggataagggcctccagctccatccatgtccctgcgaaggacattatctcattctttttcacggctgcatagtattccatggtgtatatgtaccacattatctttctccagtctgtcactgttggggatttaggctgattccatgtctttgctattgtgagtagtgctgcaatgagcatacacatgcatgtgtctttgtaacagaatgatttttagtcctttgggtgtagacccagtaatgggattgctgggttgaatggtatttctgtctttaggtctttgaggaatcaccacactgtcttccacagtggctgaacttgtttacaatcccacagacagtgtataagcattcctttttctccacagcctcgccagcatctgttattttttgactttttaataatggccattttggctaatattagttgggatctcattgtggttttgatttgcatttctctaatgatcagtgatgttgacctttttttttcatatgattgttggctgcatgtatgtctcctcttgaaaagtgtctgttcatgtccttttcccacttttttatgggattgtttgttttcctgtaaatttgtttaagttctttatagatgctggatattagacctttgtcagatgcatagtttgcaaatattttctcccattctgtaggttgtctgtttactctgttgatagtttctttcactgtgcacagctctttaattttattagaccccatttgtcaattttttgcttttgttgcaattgcttttggcgtcttcatcatgaaatctttgcccatgcctatgccctgaatggcattgcctaagttgtctttcagagttttcatagttgggggttttacatgtcagtctttaatccatcttgagtyaatctttgtatatagtgtaagcaagggagccggttttcatcttctgcacatggctagccagttatcccagcaccatttattgaaccgggaatcctttccccattgcttgtttttgtcaggtttgtcgaagatcagttagttgtaggtgtgtggtctcatttctcggttctctgttctgttccatttgtctatgtgtctgttcttgtaccagcaccatgctgtttgggttactgtagccttgtagcatagtttgaagtcaggtagcatgatgcctccagctttgtcctttttgcttaggattgccttcggtattcgggctttttttgttttttggttccatatgaattttaaaatagttttttttttctcgttctgtgaagactgtcaatggtagtttaatgggaatagcattgaatctataaattgctttgggcagtatgcccattttaatactgattcttcctatccatgagcttggaatgtttttccatttttttgtgtgtcatctccgatttctttgagcrgtggtttgtagttctccttgtagagatctttcacctccctagttagctgtattcctaggtattttattctttttgtagcaattgtgaatgggagttcattgctgatttggctgtcggctttactgttgctggtgtataggaatgctagtgatttttgcacattgattctgtaccctgagactttgctgaagttgtttatcagcttaagaggcctttgggctgagacaacggggttttctagatataggatcatgtcatctgcaagcagggataggttgacttcctcccttccaatttggatgccctttatttctttcacttgcctgattgccctggccagaacttccaatactatgttgaataggagtggtgagagagggcatccttgtcttgtgccggttttcaaggggaatgcttccagctgttgtccattcagtatgatgttggctgtgcgtttgtcacagatggctcttattattttgaggcatggtccttcaatacctagtttattgagagtttttaacatgaagcgatgttgaattttatcaaaagccttttctgcatctattgagataatcatgtggtttttgtctttagttctgtttatgtgatgagtcacatttattgatctgcatatgttgaaccaaccttgcatcccagggaggaagccaacttgatcgtggtggataagctttttgatgtgctgctggattcagtttgccagcattttgttgaggatttttgcattgatgttcatgaaggatactggcctgaagttttcttttgttgttgtatctctgccaggttttggtttcaggatgatgctggcctcatagaatgagttagggaggagtccctccttctcaattttttgaaatagtwtcagtaggaatgctaccagttcctctttgtacatctggtagaattcagctgtgaatccatctggtcctgggatttttttggttggtaggctatttattactgcctcaatttccaaactcattactggtctgttcagggattcagtttcttcctggttcagccttggggaggtgtgtgtgtccaggaatttgtccatttcttctagacttcctagtttatgtgcccagaggtgttcacaatattctctggtggttgtttgtatttctgtggggtcagtgataaatattccccttatcatttctgattgtgtttattcaaatcttctctctttccttctttattcgtctagctagcggtctattttattactttttttcaaagaaaaaaaaaacagcttctggattctttcattttttgaagggtttttcatgtctctgtctccttcagttcagctctgatttttgttatttcttgtcttctgctagttttgggatttgtttgctctcgcttctctagttcttttagtagtgatgttaggttattaacttgagatctttctaactttttgatgtgggcatttagtgctataaatttccttcttaacactgcctttgctgtatcccagagattctggtactttgtatctttgttctcattagtttcatagaacttcttgatttctgcctaaatttcattgtttacccaaaagtcattcaggagcaggttattcaatttccatgtaattgcatggttttgagtgaatttcttaatcttgatttcaaatttgattcttctgtggcccaagagactgtttgtcatgatttcagttcttttgcatttgtcgaggagtgttttacttctgattatgtggtcgattttagagtaagtgccttgcggtgatcagaagaatgtatattctgttgttttggggtggagagttctgtagatatccaccaggtccatttgatccagtgctgagttcaggtcctgaatatctttgttaactgtctgtctcaatgatctgtctaatattgtcagtggggtgttaaaaagtctcccactatcattgcctggcagtctaagtctctgtgaaggcctctaagaacttgctttataaatctgggtgctcctgtgttgggtccatatgtatttaggatagttagattttcttgttgaattgaaccatttaccattatgtaatgcccttctttgtgttttttgatctttgttgatttaaagtctgttttgtcagaaactaggattgcaactgctgcttttttatgttttccgtttgcttggtagattttcatccatctttttattttgagcctatgtgtgtcattgcatgtgagatggttctcttgaagacagcataccattggatcttagttccttatccagcttgctactctgtgtcttttaaytggggcatttagcccatttacaatttaaggttagtattggtatgtttggatttgatcctttcatcatgatgctagctggttattttgcagacttgcttacatgtttgctctgtagtgtcactggtctgagtacttcagtgtgtttttggagtggctggtaaccatctttcctttctacatttagtgcttccttcaggagctcttgtagggcaggtctggtggtaacaaattcccttaacatttgcttgtctgaaaataatcttatttcttcttcgcttrtgaagcttactttggccagatatgaaattctgggttggagtttctttaagaatgttgagtattgacccccaatctcttctggcttgtaggttttccactgagacatccactgttagtctgaagggcttccctttgtaggtgacctggcctttctctctagcygcctttaacattttttctttcgtttcaaccttggagaatctgatgattatgtgtgttggggatgttcctttcgtggagtatcttcctggagttctctggatttcctgaatttgaatgttggcctctctagctaggttagggaatttctcatagatgatatcctgaaatgcgttttccaaattggttccgttttccccatctctttcagggacaccaatcagtcttagattcgctctctttacrtgatcccatatttctcggaggttttgttcattgcttttcattcttttttctctattcttgtctgccagtcttatttcagaaagccagtcttcaagctctgaaattctttcctccgctttgtctattctgctattagtacttgtgattgcattatgaaattcttgtagtgtgttttttcagttccgtcaggttggttacattcttctctayatgggctattttgtctgtcagctcctgcaatgttttatcatgatttttagcttgcttgcattgggttacaatgtactcttttaactcagtgaagttcattyctatccatattctgaattctacttatgtcatttcagccatctcagcctcagcccaattcygaacccttgctagagaggtgatgcagtcatttggaggaaagagggcactctggcttcttgagttttcagcattcttgcactgattctttctcatctttgtgggcttatctaccttcagtctttgaggttgctgacctttggattttttttttcttttaacagtctggccatgtttctgtagggctgctgtactttgctgggcttcttctccagttcctagtctccttggattttccagtacctggagctatcaccagtgaaggctgtgaaacagcaaagatgtcakcctgcctcttcctctgggagctccggcccagcgaggtacagacctgttgccagcccaaatgcgcctgcaggacaaggctggagaccctggttgggaggtctcacccagtcaggaggaacgggatcagggaactgcttaaagaagcagtctgtccatgctttcacagatcagctgtgctgtgctggggcactgcttccacccctggttggtgtgggctctccaaagcctggaggccggaacagctaagtcgcccaaacagcaaagatggtggcccctccctccctccgggarctctgtcccagggagaattcaaatctctgtcagccagagaacaccagtaggggttgctggaggccttggttgaaaagtcccacccagtgaggaggaacagattgggcacctgcttaaagaagcagtctggccatgcttctgaagagcagctgtgctgtgctgttctggggtaccacttctgggagctctgtcccagagagcagcctgcccttccccctgggacctccgtcccaggtaggtgcaacactgctgctggtggctggctggaattccaaaccagtgggtcttatcctgtgaggtgcagtggaagtggggcccgcagatcgtgccgcttggccccctggattcagcctctttcctaggggtatgtacaggggtctaatctcccgctttgcaggagttgcagttacttttgctgggaaacccagggccggagtatgtaaagctgctgggtctctgcacgtgctcaagcggctactctgctgagactccatgtatctctgtgtgtcagactgaaggccctggtggagtgggttcaccaggggatctcctgacccaagggttgcaaggatccatgggaggagcgtggtttcccaggatcgcacattcacttacgacttccctgggtggaggaggttcctctgtctccatgttgctcctgggtgggctgtcatcctgccttgcttttcttcattctctgtggatcgagttgtttccttgattagacccaatgtgggtacctggatgtttcagttgaaggcgctgtatttactcgcccctttccttcccctccatgagaaccactcaccctagctgcttctagtcagccatcttggccactccctccccgccccccaccttttttttttaaatgcttgaaaactatttgcaaaagaaacctagagattctcatggttcttttaagatcttgttggatggactgtgaaagtgggattattgtctatgaatggtcagctagactgtgtgtgtgtggaaagggtgagggaattaacatttattgagcaaaagggcatgctagttaaaatcattgtctctggggacagatttttctgggttttaatccaaactctgacacgtattagccgtgtgacctctatttttcatttgtaaaatggagatgggattgttgcggggattaaaagcacttacaacagtccaggatatagaaagcactgtgtaagagctggctgtcatatattagtcatcagtcatcatacttaataatcacaaaattgttagaaaatcctgtgaggtaggtattttccttaccatacccatatgagaaaacttaagcaaggagaagtcaaacaaagttaccaaagtcacacaattacggagtgacagagcctttagacgctgcctagtccaaggctttcatttcacagaagagaaaactgaagttcaaaataggagagggacatgcctgaagtcatttagtgagccagtgacagaactgggcctagaactcagcagcaggactcttcctgtcagtagttctcaaactttgtcatgtgttacaatcctgcagaggacttgctaaaacaaactgctggtacccatgcctagagtttcttacttagtaggcgtggggtgggccttgaaaatttgcatttctaaggagttctcaaatgatgccactgctggtggtctggggaccctactttgggaaccaccacaacacaccataattcatacatcttttgttcttttcatcatggactacacagtgtgtgacctacaaacactttcaaagaaatgggaaccggtgatgaaaaccaaagaaaattacatatctagcagcaagaaggtacggtgactgaccaacagtcctggtttgtgtgggactctcctagttttaaaatggaaagtcctgtagttctgggcacaagaggatggttggtcactctagatgaaagcaaacaaaagtcagtgtcagctaaatgccaaacgaaaaaggacatacatacagagaatgtggtaacttctggtgaatttgtttgaaaaggacccattcatttattcttccaacacatctgtattataaaactactatccataaggcactgtgttaggtgctgtgttcctgaccctacagatcccattccaccatagcaaaaggtaaaagtgactctacagtgagcttggtagacatagacccatgcttatatactcagggacacctggaagagatataaaaacagaaacatctcacataggaagttttcaatgcatcgtgatcaggactcaaataattcccttctctttttcttcagtgtactaaagggagcacattgttgagaaggaccggttgcaaatttccaaaaaggagagtaaaataattaatgagtcaaggtctcaggagagacagaaggtaaggggagtccttcagtaagtggggaaattgatttgttttgtgtcctcatctctccagggccatgagcatgtcctttgctggccataagtcaatgctgatgacctcagttatagtgtaatcttcaaggctaatttacgcaaaacttcagaaatggtaaacatcctcatgaagactaatgatgacatattttaggagtgcataatagtaggtatagagaaaaaactgcagggtaaaatgttattgctgttcttattgctaaagggcatactccttaagaaccaaagttaattatcagtcctttgacctaagaggaaaacaaatttcagggactcccctaaagattcctatatagtacaaataaaatgccaaaatattttggaacacattttggagcactggataggtcaataaaataatgtgtaaattgccaaatgtgatctaggaactccctgcaaacatcagattaggctctattctctatctgaatactgactttgctttgctttgtaactcctatcttcactaataatgccttttcccccctcttgtgtgcatcctagcctatattctctttcatcattctacagtggtcaatgtggttattgtacagcttcactttcaatgaaagctgagggaaaagaagcctcataccctgccccccccccccgcccccgccaatacgtaaaagaagccatttaaaaaataaaagcagcaagctactaaatttgactcattcaaatcttggcaattagcatgtatagtatgttatgagagagagagagagaaaattagcagaaatggaggaaaacatattacatcctaaataccaccaaattgccaaaatacacatttgggtagtaatctccagagaactctctggaggcacagcatctatcatgctgatttccctgaacaatattacagaatagccctgtgtactttctcttgggggggggaggtgtaaagaattatcatatggaacctcacaagtctctaaaacctttctgcaattatccctcataggattaccacactgatgagtttgttcaacaggcgctgttgtgacttcctaatttaactcctatagagatgatttgtgtggaagataaaacactatatttgaactcaattcccaccttatccctgagcttatgctaccaagcaattcttacaatgtttggagttctattagactacagagaagaatctagggtttcagctaaaccctttaatccacaggcctaggtaaaggactgtctcaaggtagtcgctagcccatgggttctcaaagtatggtctgaagacccctggaggagtccctgagacccttttcgtgggtctgcagattaaaaattattttgtataataacaccaagatgagttacattcaattaggcatttttcttttgaaattaagcagacttttggaaactaagatgtgcatagccctgtagtaggctaagtggaagttacaaaggcagtagtagctttttttccccctctcgttatctcatgaggatacagaggacttttccagaggctacatgacatatggttatgtcatctctctcatagctgagggatgtgtgcttctgtgttcttcttgagctttaaatatttctcagtcttaatacctaaaataattagtatcaatagatagaacccacacccaagaactccttggggccttcaataacttttaagagtgttaaggtgtcctaagaccaaacattttgcaaattgttgctttatcaggatttttgttatttctagaatgcatttctttctaactgatctacttgggaaaaaaatcgttacctcatggcaattattgctttcctatcaatatggagattatatttctgaaggagactgaccaaaattatattaaaaggtttaaataaaacaagtggatccatgttataacatgaggaagagagctgccccactagatgtctgacattagataactcagagtcccgcctctccaacaagtctcccttactagagaaacggacagattctgttttgtgggatgggataaggagacaatctgaagtagagtttgacacaatattattctgcccatatgaaattctggtagccagggtgccaggtgtattcataatccagatgctgtcaattttaagcctgaagccccaagaggcgagcagtgtttaatacatcatctcttgttaaatagcagccacacagttggcggtagccagtgaagcattccctgccatgtaggacacgccagttgtctataaataggacctgtgaatgggccaaaaaaaaaaaaaaaacagagagaaaacactgtcagaagaaggacagaccaaaggaaccctaagtcagaagagatcatttaaaagataacctttaggttgttttctggttgcattaaatgagatatttttcttttgaaattaaacaaacttttggaaactaagatgtgtatagccctgtagtaggctaaatggaagttacagaggcaacagtaggtaatgggccctgcactggaggagcttctgtttctcaagtaattgttctcttatcaaagtaaatcagataattggtttgtttctttttctttttctttaattcttattctaccctttctcaaagggttaaattatctcatgacattttatgctaagctgaaggtatttttcatccagaggaaataccaaaaataaaaactatggaatcatgaagctggaaggacccttgggggtcatctagttaaaccccttcatcatacaaatagagtcactgatgccttagagatgggatgaggcttgcttccagagcattcagtgagtgggcggcaggaccataaacaaaaccaaggactcttttctctttttcctttgcaacatcgtgactcacatattaagtaagtacccgttcttcactgcttcagtattacaagcttgcttgacatctttagagattaggacccaccctgccaggctttagtttgacccaaaactcattctcaggtctcctcaactctatcgttagagtccggtgtgctgtataccagcgatggacgacatcataaggaacggtattgatgacagcccggtcatagttgttgtacctaacatggaatcatgagaagaaagatctcaaacacatgttaaagacatcttttgtttattgaacaattttatataaggcttcccctatgttcaatacttgtcccagagacgaagtgacgataagtcaatattctctcaggaatatcacattggagtgaggagttccactgcctgttgaccgtgttttgtttttctttgaataatctaaggatacgggatagaagttaagttccaactggtttctctcatcttatgatatgatattttaagtctttactggccaaaggtcatggaagcactggggaaagcgctgagctttctcctcaccaagctgaggtggggtggacaagagaggttgtactaacaaagctttccttttaacaggatgacttacaacttaagtgtctccctttgtgggaggaatcccagctatagcctagtggaccattcacccagggatcttcaatcattcgttcaaccctaacatttatatgcgcaccagctacatgctaggcagtgcgtcaggcattaaagatacaaggacgaat

SEQ ID NO: 97388 - DNA, 29159 bp, Homo sapiens
gagaatggcgtgacccgggaagcggagcttgcagtgagccgagattgcgccactgcagtccgcagtccggcctgggcgacagagcgagactccgtctcaaaaaaaaaaaagaaaatacctggtgtattatacatgcagaatgcatggtttgccaggtccacaaaacagaactaacatggtgtaaccttgcaggattgtctcaggaacttcatttcaacttagaaaaatgattcccaaccaggcagagtggcccgtacctgtagtcccagctacttgggagcctgaggcaggtggatcacttgaggccaggagttccaggcctgcctgggcaacatagcgagacctcatctcttaataaagagaaagaaagaaaaatggttctcaatttgcattaccaatcattgcttacaaatggtgtttcctgagtttcgtgtctgaaatcgcaaataatcatagaatgtttcagactggaagagaacttggaagttaaaagagaatcgcccaagtcgtctcagtcaagagcagctgacccaggctcacaaacttcctgaccgcacctcctccatttccctcaatttatggatttaaaaacgctgggattgagagagggaggaaattgctctgaatttcaccgcgagtgaaggatagagcccaagccgaatgcaggtctctgactctggaccagccctcgggcttttttcctgcaccacagcgccgccgtgtggcagctctccctaacttctgctctcataggctatgacaacatccctgtctccagggacagagcggggagagatgcacaggctggctttcttcaaaaatccctgttgcagggaaggtggatgggggaagtgagggataaatgcttgcgatagaatgttaaattaaaaaggcaattacatacaactgtacattttctttttgtctcaaatatttggtgactagaatcaaccatagatttgctaaactgtagatacaggataacacttgtatttaatataggtatgagtaaaagaaaaacccacaattctagtggtgggaatatttgaatattgagatgagtggtgatttctattttcttctttaaacttttccattccttctctctctctttttttaaaccttgaaaaaagtattaccatttattttattatcagaaaacacacacacacacacacacacacacacacacacacacacaaagaaatttctctttggttaagactttctgttccctcaaaaacaagaataaaaaaccaagtgacttcctttaattcttatgctcatgatgttggctatgggttaaacataataagaattctcacgctcctaccttctttaatcattttcagtttctcaaagaagccccctaatcacacctcctcacacagccttcccctttccatccctctgcagtcatggagctgaacagagcccatcttccccaggagcccttattctagtgttaccgaacccactcctgcagcagagccctgcttaaatagctttgccagatgaggccacattcaaatattatcaggaatgagttttcttgtggttggaactttactacttaactttagattttattgaaaggcagtttgcgaggaaattttataaaatataagtatatttgactagactgcgatgagaaaaaaagcatttttcccttccttgatacaatttttttttttttttgaaacgaagtttcactcttgttgcccaggctggagtgcagtggcgccatctcagctcactgcaacctccgcctcccaggttcaagcaattctcctgcctcagcctcccgagtagctgggattacaggcatgtgccaccacgcccgactaattttgtgcttttagtagagacggggtttctccatgttggtcaggctggtctcgaactcccgacctcaggtgatccaccctcctcggcctcccaaagtgctgggattacaggcatgagccactgtgcccggcctctccttgatataattaaatgcccttccttagtttaaattttacctgaaaaatctttattgtaatatgacactaagtgggtcaaaatgggccgggcacagtggctcaccacgcctgcaatcccagcactttgggaggctgaggcgggaggatctcctgaagttgggcattcaagaccagcctggccaacatggtgaaactccgtctctactgaaaatacaaaaattagttgggtgtggtggcaggcacctgtaataccaccattcgggaggctgagacaggagaattgcctgaacctgggagacggagattgtggtgagccgagatcacaccactgcactccagcctgggcgacagagctcaaaaaaaaaaaaaaaaatcaaaatgctttcaggcacctgctgccattttaaatgaagttctaaagtggtgtctttctggaaaggcactgtagttggggagcttatgaacttggggtgggctactcttggttgtgtggctttgtgcaagtctcttaacctcgctgagctgcagtgtttctcaaatatagaatgaagataatcatatctacctcttagaattgtttgggggatttaacaagataatgcgcataaagcatttggcacagcgcgaggtacagtgtcaaaaccggaggcacgtgcttttatcattattattgagaaagatgttggtgggtattcaacatagataaatgacaaaatcctggatggataaaccatccgttcacaccctccgctgccaagctatcaagaaagcatgtgcatttaattcttaaagttgaatgaattctcacagagcttgagaattttcttccttcttcctggagtctctgttccagagctctctaataagagcagctggcacactctcactccaccacctgcactacaggatccagccagggccctgattcccaaccccctgacatacacatctactcactcctaggacctttctctgccagccagctccacttggtctcacccaaacattccctggaaacttttttgtttgttttttgtttgcttgttgttgttttttgtttgtttgtttgtttctgacagagtctcgcgctgtcacccaggctggaatgcagtggcgtgatctcagctcaccacaacctccaccttgtgggttcaagtgattctcctgcctcagcctcccgagtagctgggattacaggcgcccgccaccaggcccagctaatttttgtatttttaatagagatggggtttcaccatgttggccaggctggtcttgaactcctgatgtcaggtgatctgcccccctcggcctcccaaagtgctgggattacaggcatgaaccaccgcatctggctgcttgttttagagatggagtctcgctttgtggcctgcgctgctggagtgcagtggtgtgatcacagcccactgcagcctggactccctggctcaagcaatcctcccgcctcagcctcccagggtgctgggattataggcaaaagccaccacgccaggcccctggaaccttctttatattatttttctcagtcctttctttataaaagaatgaaaaagtaaaactcagcctgtcccctgtatagatgatggcaaattcccacgatggaatcaaataaatgattgacacctttcaactgtgagatagttatcaagcacctattaaatacaacacattgtcagagaccttggcggggaaggtctgtgcccttggcgggcactgcttgccctccaaaaacctctgttgaatttagggataagatacaaaagcacaaagagacaagtaatccagggacagtcaccacagcctagcagctactgtgtaaggcccaaccacagtgttggatgctttacaaatgctttgcctaagcttcacctcagcccaacaagcagatgttattatccctgctttacaaatgagaaaacaaggtgggacacaatggcccatgcctgtaatcccaacgctttgggaggcagaggcaggcagattacttaaacccaggagtttgagaccagcttgggcaatatagtgagacctcatctctacaaagaaaaaaataaaaataaataaaattttctcaaagagaaaacaagaggctcatgaaattaaggaactggtccaaggggacacaatttgtcctgaaccatgattcaaagccatgtgtgtggaacatgaaagctcattccctttcactattccacaccaataagtgactcaagccaacaatatcaagcacatcccaaggaggtccatgtgactgtcaactgggcatcataaccaggagggccaggaggaggagattgatcagggtccccaacccagacaggagtggcccggggagactagactcttgacagtaactcccccaacctggccccagaacgtccccttatttgctgtctttattcacataagattgggttagcttcctcctgcttacagattgaaaactgagacacacagagatgagttaccaggaaccccggcctagctggtgacacagttgagactgtgtatcccaggctctgtgtctgctccaggacattctcactcctccagtgcccccattccttttttttttttttttttttttttttgagacggagtcttgctctgtcacccaggctggagtgcagtggcacaatctcggctcactgcaagctccgcctcccgggttcacgccattctcctgcctcagcctcccaagtggctgggactacaggcgcccggcaccacacccagctaattttttgcatttttagtagagacggggtttcaccatgttagccaggatggtctcgatctcctgacctcatgatccgcccgcctcggcctcccaaagtgctgggattataggcgtgagccaccgcgcctggtcctccagtgcccccattctaatcctcctcctgagggctcactacagggagagactccccagccttcccatgtttcttctagttggctatgtcagtggtcctaagtgcaggcctcaggcagcatcacatctgccaggaacctgtcagggaggcgaatttagggcctccttgcagaaccactgattccagtaggcccagcaatctgtgcttaaaacaagccctccaaggaattcctcacaccaaggtttgagagctagtgaaaagcattctactcccccgagctgtgcccacgttaatcataaaatcaaggccattgcgttaacaagttctctgcctcacgctgccacctcatcatgaacaaaaagaaaagaaaaagacaaacaagaaagctcctgctgttctctcctgcgtgcagcctgactcccacccgtgcccacattccccaagccccaattcctgcactgctgcttccctccgcgccttacctcttccagtttagtctgtcgacaggggaaagaaaaagttaggccaaggggcaatttcttatgctttaaatctttggtcttcatgaaatctgccagacagtcagctacatattcaaacagctgcagagaagagaaagcaaagtacatgggctaaggtgtggtttccccacacacggatgccaccgccttccctgcggtcacaggagccacctgccaggtacctctgtgccgttcccgcggatgatttcattgggcgttgggtagaactgactctccatctgcacgtgtcgcttcccctcttcagcgacttgcaccttcagcactcggaacttggaccctccgagatccagggaaaggaactccccattttctattaagaaacaaattcagtttccatttattgagggtctactacagatatggcaagctctgcattagaggttggacatataatcaacgtcttcaaatcacagccactaggtatcattatgctcatttgccaaggctgaggactctggccatttctcagagccctcgaggtaaggcgcagagctgagatgtgaactaagtcagcctgactctgcagcctgagcccaacccactggctcatgctgtaggaatgtgcatgtcaactggagagggcaaatgtgagcacagcccttgcggtggtatgagaggtggcctcgacggtggagcccatcctgggatgccatcactgggaagagagagctggtgctcccagcctggggaaactcggataaaggtatgagggggaagacaggatgtgcggcgaggagcagccagcctcctgcagccgatgatcctatgggcagagggaaaacaytcctggaggggagaggagacagggactaaacaatggcccttgaggtgccaaggatgctgatttttttaggccagagccactccaaaaggagacattggaacacaacccagcccagcccaagacagatgccattaattgaaaggtgggggctgggcacagtggctcatgcctgtaatcccagcattttgggaggcygagrcgggcagatcacctgaggtcagcagttcaagaacagcctggccaacttggtgatgttgctgctgttgctggtctgtagaccatagttagagtagcaaaggtgcagccagctcgattttttgtttttgtgtagacatccggaaattcttaccttcacagatcagccacaaaggagctgatggagtcatttattatttggtgagggaattcagggagttaatcctatgcaacttttattagtatatattatgcaccaagtaagagggttctcccagatgctgtcttgctgtgtaggaggtagggtagatcccacaatctatgtccacacatttactgagcatctactctgtgctgagtaacatgtgttaggtgctagggatgcgcagatgaaagacggtgtgctccctgggaaattgatccgaaatacaggcgcataaatcagctatttccatatagtaggaccagtgctcagattgtgagaggcacagggagagatatccaggtcaaagctgggagacaaaggcagctggctttgcagggaggggacacagagctgagtgttgaagggtgagcaggagtcaggctgccaggctgccgggagcgggggtcccagggagaggaaccacgggcaaaggaatragaaagcatccgmtargagtgagtgtgcttttgccaaaggagggcagctgtcacagaaatgaggttggaaggtggctctcaggttaaatttggaaggatttggaaaagctatccaccccaaggagcttgggctttatctggaaggtgagagggagctgcagaaagattttaagctagggagtgccaagatctgagattctggggacaaatgcctctgacaccaaccagaatagactgagggtttaacaaaagaagaggctgctgcactgccatcggacgggaggggatgtgctgagacctggccagtgtcggtgtggaggcatcccactcccggcccgcatcgcaatcactatcaaacacctcactccaccagtggctcgaggtgccatttcatggatgccacacggtgtgatcccttctgtctctgaccccagaaaaaaggaaccagtggaccctgggagagggaggacttgcccaggcaacagcagtctgtggggcctcagagtcttcacagacatcaagaaaacagccccggccaggcacggtggctcacacctgtggtcccagcactttgggaggcccaggcaggagaattaatcccttgccaagagttcaacaccagcctggtcaatatggtaaaaccctgtctctacaaaacaaaagacaaaaaagtcagttgggtgtagtggcatgcacctgtagtcccagctacttgggaggctgaagcaggaggatcacttgagcctagaaggtcaaggctgcagtgatctatgatggctccattgcactgcaggttgggcaacggagggagaccttgtttctaaaaagaaagaaaagagaaaacagtgtcctaagcggggtaaattgctttggccaatctgcctgctccagaggaccctccatgaactgccttggacccaatggttcccttctcgtaagtcactgctggtgctggtgccttcactccctccttttacccagtgcagagtctcccaaaggtgcacagtggctgaatgcggagattcctggagattcagagtccccagggggaggggctgggaaagtgtgtattaggaaacactcgaggctccaggctgacgacctcagggctcccgggctcacccccaaggcctatttggccttggaggctgactggaggctaaggcctggaacagagccagcaggggtcaagccaaagaatcacagtcaccctcatgcttcccatgccccttccatgactggcagagaaggctccagtattaacacagcacttttaaggcacttgatcctgtcagaacagaccactgmagccccctgaccaaaaggctgggtggtaactaaggctcaaacaggtgactccctcgcagataggtcctgatgggagtaggcaaactcaggacttctctggaagctgcatacatttctgaaacggacaccataaggaattaggagagttttgyttgttttttgtcggtaatcatgaaattataccaccagctcacaagagctaggaggacttgggacaagattttagagatgttaaagcacgccatccacatgatctcattaaatcctgacaatcatgtatggtgccgggatttaccaagaacacctggcttattagggactctgggcccagggacctcggcacaacagaatcactggtgagatgctttgtgtggtgagaggctctgcggagacggggatggggagctgggcgtcttcccggctaaggaggagagagtttctatgacttagttagtttcacttctgaaccttcagaagcagccagggccaggaggacaccgcctgtcccagagcctccagaccatcaaaggccaccttcccttgcttctggggacacaccttgtctgtatcaggaggaggggctgcagtccaggaagccaggcggacttagccctggtgctccccacatgactcagctgcttcctcccaggggccccagatgccctgtcaaggacacgtcccagtactctcgtcaagctgtggcaaggacagagccaagatttcaaagtagggctgtctctctcygaagctcarcrtccttccaggacagggcactgtccatcccaagcacctacccacaagtgagggcacagggcctttcccagtgcagtgtcccagggcctctcaaccagcagagccaagctaccttgatccaggcattgctccagagaggtccagaacacgactgatcccatcaaagccccctgagagctcccaaacctcagaccctgctcctgcgagagccccagtgctctttcacgagctcggtttgggcactgggaccctgacatgggagaaaccccttggtccttggtggttctgtctgaacagccacaccacagggttgtcacaggaaatatgtggctcagcgagtccccagcaccccatgaccacagtggttgctcagtaaatggcagctttctctctttctttctttctttttctttgctttctttctttcttctttctctttctttctttctctttcttctttctttcctttctttcttctttctctctctttctttctttctttcttcttcctttctttctttcttttttgatggcgtctcgctctgtcacccaggctggagtgcagtggcgcaatctcggctcactgcaacctctgccttgcaggttcaagygattctcctgcctcagcctcccragtagctgggattacaggtgcatgccatcacacctggctaattgttgtatttttagtagaggtggagtttcaccatgttggccaggctggtctcgagcatctgacctcaagtgatctgcccccctcggcctcccaaagttctgggattacaggcgtgagccaccactccaggccagtagcagcccttttccctcttacagcttcattcagaggctgagaatggaagagttggatgggacctcatagatcctatctacagatttctaggccattgtaggcaaaataatgtcccccacccccaacaaagatgctcacatcctaatccccagatcctgtgaatatctgagggtgcaaggcaaaggggaattaaggttgcagatgggatcaaaattgctcatcagctgaccttgaagttgggagattatcctggattatctaagcatgactaacgtgatcacaggatctttaaatgttgaarggaggcagaaggtcaggtcagagagggacctgaagaggctacactgctggctttgagaacagaaaggggcatgcctcaaggatgcaggtggcctctcgaaactggaaaagttaaggaaacagattctcccctcaagcttccagaaggaacgcagccctgccgacacctgaattttggcccagtgagacccactgcaaacttccgtccaccagaactgtcagagaatatattcgattgttttcagccactgtgattgtagtaatacatcacagcagccataggaaacagatacataggccatttctcattctacagctgggcaaactgaggctaaacacttgcctcaggtcactgagagtgacagagctgggcctcagacccaggtttgttgaattatcattgaatgtgatttccactacatcattcttgctcccattactcattcccagtgctacactaggtgctgggaacactgtggtaagaccttggacccacggagtgagtggttaatttggtggagactcagagtggggacacagcaaagtgacaagtgccctgacaagcacccagcccagcacagggatacttcctagatggaggcagggaccactacgctgagacggaaaagccacgttgatactcaccagggaagaacatggagatgctccaggaggagagggagcaaatgtgtgaggccacgatgggcagagaagccamggtgcctggggctgcagaactgcagaactgcaagagggattcagcaggactgaagcagagaggggcagggagggtgggacagcagagagagggctagagagagaagccaaggtacaggggcaaaccttaggtactttagacacccatcagccaagaggagccagggaccctggcagcggacaactgcactcaccggaaccatcgggaatggccctgacgaaggtgggcaacatcttcactgcagccgtggggttggtgycctttgccaggcccttctccatctcagcccggaaccgcctcatgatgtccaaaagggtgtcatcggagagccgcatgtgatacaggaacctgtccacctggaacagacaccggccaccaaggggtgctgctgggggccctcaccctccagtcgaggctgtaacccccgacatccctcagcaagctgcattcctgactctggggacagcattgagatgtggattcccaaagcctccctatctgacccctcctcaggcagaggacagggaagcgagttaggaaagcagaatggaatggagggctgagaaggtgtggagttacttctctgaagggcagactctgaggagaaaatgattctcccattattctgatgagacaagggagaggcagaaactaagaaggattcagggtttccgattcccagttcagggccctcaccagtgtcccattcctctccaccaaaaaaggccagctagagcttgaatcgtagatttctaaacatggaagctttctttcatccaatgatgaccacagatatagctagacaggtttctctttgtttactggctgctaggaagctcagagctaaatttcatttccaaaagcaatgcctaaatctagccctttaaatttccctccttttttttttttaagacagagtctcactctgtcgcccaggctggagtgcagtgatgagatctcggctcactgcagcctccacctcccaggttcaagccatcctcctgcctcagccttctgagtagctagtattacaggcaggtgccaccaggcccgactaatttttttttwtttttatttttagtagagatggggtttcgccatgttggccaggctgttcttgaactccagacctcargtgatccacacgcctcggcctcccaaagtgctgggattacaggcgtgagccacctcacccagccataaatgtccattttggtttaactgagttgttctagttaagacaaagctgaatttttaaagtcagctcagattgctattgaaaatgagtggatgtcactcatgtaaccaggaaacggggacagaggaccatacccaaaggagggaagttatacaaatcactatggctaaaatcagtcctcttgttggtaatatgtcacatcagggacggcagcaaagcttcctccctcacactaattaacactaatcaattggtgctggcagtctggagcccgggctcactgggatggattattgatgggggcaggaggagagacaggggcatatgcaccctgtcctttccagccctgtttttatactgagcactctccaccctccaggtgacaggaggctccatcccaggcacattcccggtgaaagggcattttatccagggtgaagaacacgtgctactgtctayagagtgcgtccaygtacrtcacctcttctcatcgccacagcatccctttgaggcagccacgtaaggccaaagttcttgtccccaggtgagaggtgaggtgagagggctgcagagctgtggctacgtgggactgtaacataggctctagatcactcacccccatggcctggctttggctcacagctctgtcggggatgcataagcccgacagacaaattataccaaatgcacagggctcacattaccttcgcgctaggacaggggcccggtcatcagccaggcctcagaggccaggacccagctcagtctcgtgacaacgaacagacccaagacactgaaatggtaccatggctccggggactcgggggccagagaaagaccagaaaatcatcagasagccattagcaaaaaaggacaattgagctttcagcatatttgagaaacaggatggaaccaggtcaggcttcattaagggcttcctgttcccccaaggctgtttatgactaattggttggcacagccacacacaagccgagaaaactggatgcaaaggacgtgacccaagtaattggggttggggaagggtgggatgctgtatgtgggaaccaaacttgattctttcctacccaaagggctctcagacagtgcccctgaacctactgatcatttttgcttagcctgagagtataaaaaactccaggcatccacacaatgttatccctgccatgtaagtcctgttttttgagacccagttggggtcatttgcgactggggtttaatggggtcattgagcacttggtttgctgctgctctttcaataagttgaggttatgacagaaagaatgtcaactcagcaacagtttccttttgatcttctgtatctgccacagcaccaggaacagttgttagaakggaaaagtgaaacatatgttgggacaaaaagcacctattttcaatccaaacaagtcatgtggggtatgtgtaaccagggacacacgtcccaggcactaagggagagtactggtgctgcagaaaaccaagcccacttttggagagacacacaaaccatcatgggagatatcgtctaagcaagaaagccaaccagcagcccgtttcacttagaaagagcaaatccaacattcaagactcaagactgaattgcagaaggtgggagctggaggggccttagagctcgtctagtccaaaggtctcacattaggaatgagagtcataaaaaattccgctctttgacccagggctttcatttccagaacctattctcaggaaataatcctgactatggagaaccataaatctctaccaaggccgggcgcagtggctcacgcctgtaatcccagcactttgggaggccgaggcgggtggatcacctgaggtcagagttcgagaccagcctggccaagctggtgaaaccatgtctctactaaaaatacaaaaattagccaggcgtggtggcgggcgcctgtagtcccagctacttcggaggctgaggcaggagaatggcatgaacccaggaggcagagctggcagtgagccgagatcgcgccactgcactccagcctgggtgacagagcaagattccatctttaaaataataataaaaaataaataaataaaaataaaactaaaactctaccaaggtttaacataacaatacttttattttatttattttatttttgagacagggtcttgctctgttgcccagcctggagtgcaatggtgcaatcacagctcactgcaacctcaacctcccgggctccagtgatcctgccacctcagcctcccaagtacctgggactacaggcatgtgccaccatgcccagctaatttttgcattttttgtagagacagatctctctatgttatccaggctggtctcgagctcctggaggcaagtgatcatcccgcctcagcctcccaaagtgctgggattacaggcatgagccacttcatccagcctaatattttaattattaaaaatgtttttgaaagtatccaaatgaggccaggcatggtggctcatgcctgtaatcccagcactttgggaggccgaggcgggcggatcccgaggtcaggagttcgagaccagcctgaccaacacagcgaaaccctgtctctactaaaaatacaaaaattagctgggcgtggtggtgcggcctgtgatcccagctactcaggaggctgaggcaggagaatcgcttgagccctggaggcggaggttgcagtgagccaagatcgcaccactgcactccagcctgggagacagagcaagacttcgtctcaaaaaaaaaaaaaaaaaaaaaaaaattagattgtggtaatggttacacaactctggatattcgaaagtatccaaatgtccaacaagaggaaaaggttaactacattatggcatatccacttgattggatattaagaagacattgtaatgataattatgatgataatgaagaaatctatgtaagtggttacactgtaacagtaagtgagggaagcagttcagaactgtatgtaccttataaacataactaaaaacatacaggatgaagaaaaactaggaaggcttccacccagcaaatatgaaagtgtttgagattaaaagtaaattaaaggtggaattacaagtaacatttccacttttttgtaatgttgacatacagagccatgaaaaatacacactgaaaacctcccagttctcctgtggatgaacaatctgcaggtcagtgaccaggtctggcctggtgctatcaataggtcaaataatgtcaatatattgaattggaaaagaatctgtcagagtggtttctattttcgtttttttcattttgttttatttttgtttccatgctggtatgggaagatttttagaaattgttccagggtctcagtagtaacccttgcaggcaccgctrgcccaggatctggacaattctagaggcaggaagcacagagacgaagaaggggactcactgcctgaccgcagagaaacgagctgtgccttttgaccaggtgtgtttccaccacgtgttgggaggagtgttctcagaaccatgactcagcccagcagccataaaccagtctcccacactaccccagagacttcctggggyacttgcttaaggtggctataaaagtgcttccaactttctcgcctcccacagggagagggaggtcagctccaggcattgaaaaaggctgactgtccttccagaaggacctggagcccatcagcagaggctgcatttcccatcacagggtgctcctgagcctgcaccagggctgttggacaaacatgtcccgcatgatcctagggtacaaaaggttaaccaacacaaaggagcccaaggaaatgaaataagtttgcagaatcaaaggtttcagggttccaaaggctcccccttgggggtgggagagacatggtgcaacttgtgcctttactaagcagataacaaaagaaagtggattcctaggcagcgcctccttaagtagccagtagagggctctgaatctaatcaacaagtgattgctttataatgtttttaaatttgctacaacctctaactcaactctctaaatgaatagaatttagtgggagtttatcccaccaagtacctgagggctgtaaggggccacacttcctctctctctttctttgttttgttttgagacggagtctcattctgttgcccaggctggagtacaatggcatgatctcggctcactgtaacctctgctgcccgggttcaagggattctcctgcctcagccttctgagtagttgggattacaggcgcactccaccacgcccagctaatttttaaatttttagtagagacggggtttyaccatgttggccagggtggtctcaacctcctgacctcaggtgatccacccaccttggcctcccaaagtgctgggattataggtatgagccaccatccttggcctttttttttcttttctttcctttttttttcagacagggtctcactctgtcacccaggctggagygcagtagcgcagtctcccgggctcaagccatcctgccaccgcagcctcccgagtagttgggactgtaggcacacaccaccatgaccggctaatttttacatgttttgtagagatggggttgctccatgttgcccaggctggtctcaaactcctgacctcaagtttgagatgagatctgctcatctcagcctcccagtgtatgcagattacagccgtgagccacggtgcctggcctccttattcattttgtaaagcaggagggagtcatggcacagcagaaagcattgaaggaagagtcagccaacttggatttaatcctcattccatcctaaatacttggtgaccttggctaagtcctcctgctaggaggacttctgtcatctgcactttgagagatgctttttgcccagggccrtgacagccagccggtgtggccagagtagcagactgggctcattttagctgcctggaaagaaccctggttccctcctgttgacccttggcaacctttaaccagcccactttggaatgaattttgtagacaagttccctgagcaaagtgacaaaataatgcacaccatgaatagtgtaccattggcaaatagcaggtgccaataatagatatttcaattactgtctattgcaactcacaccttcttgctgcccacatttatatgctttcaaatacatgaacaaacagatctgccccaacagttctttttttttagatgaagtctcactcttgtcccctaggctggagtgcaatggcrcgatctcggctcactgcaacctccaccacctgggttcaagcgattctcctgcctcagcctcccgagtagatgggattacaggtgcccgccaccacacccagctaatttttgtatttttagttgagacggggtttcaccatgttggccaggctggtctcgaactcctgacctcaggtaatccgcccacctcggcctcctaaagtgctaggattacaggcgtgagccactgcgcccagccttctgctccaacagttcttaaaacttctttgaaaatgattctcctcgcctttgtggcctttccgagcaaacatcccttacagcaaacacaaycctcttcaagctttccaaacaccctcctcacccgcttccgcatccaatacctgccaggaagttccgagtgaagtgtaaggttcaggacagtaatgcaatgcccaggagtgtgggagaattactccctcttccctcagtgagtcttttactggtcatatgctcccagtatcttttctaataagctctcttcactcccttctgattttttttttaagggaatcagttttgtccgtgaagaaggagctgggcatctctcagcttcgtgggtcctccttaccttcttgatctggtcctccttcagcttgctgaagtaaaatgccatcaagtggaccgcaaacattttccccaagtttggtttctcctgagatgggcagagattcctgtgcagtgttcactcctacgactctggagtgttgcacgcttccagtccaggctggcagacctcctggggagcgaggtgttgcggactaaatacctccagcctgcttggttcaatgattaaactcccccccaccccacccctttggtccctccctctggcacacacttgattgtctaataggaggctctggatggtagctgaggtttagtggagggggaagcagggwattgatgggttgcttgactacttgagaattgggtgccaccaaatctcattgctaagcaaccctctcaagccggggctctgccaagcccactcagccgaggaaaatcttctgcgaagttgggcactaaacaaagccaactttcaaccggtggagctgctctgcaaatttccagtcccaggcttttctctttagttttttatgccagtggcataaytctgtgaccccctgctcctcagaagcactgaactaactaaaactaaacattgtcctggtcaatgggatttcaagaatgttggggcagattcttccatttgtgacagatcagatctcttaactaatagcccatggttaacagaaaatgatcaataaatgtttacctattcacagtgttaagccagaaaatctttagttcacaggtagtgacccaggaaaaaatattcctgagaaagagtgaactgaagtcaccagtgctcactgggaatcactgctggagagaaggaagtcacagataagaaatgtctcagtccagccgggtgcagtgactcacgcctgtaacaatcgcagcacttggggaggccgaggcaggcagatcatgaggtcaggagttcgagaccagcctggccaacatggtgaaaccccatctctactaaaaatacaaaaaacttagccaggagtggtggcaggtgcctgtaatcccagctacttgggaggctgaggcaggagaatcacttgaacctgggaggcagaggttgcagtgagccgagatcgcgccattgcactccagcctgggtgacaagagcaaaactccatctcaaaaaaagaaaaaaaagagaaatgtctcaggccactgagatgttttattcactcacttctcactcatcatacttgacatgagaaggacccagaaagcacccaatacatgggtacaatcaaccttgcactcttcccacagtcactggctggctaatgaaaccaataacaacagcgttaacaacagcggctaacatggatggagcatttaccaatcccattttgtttttattactcttgttattattattttttagacagggtctcattcatcccccaggctggaatgcagtcgtggaatcatgactcgctgcaacatcagccttctgggctcaggtgatcctcccatctcaatccccagggtagctggggctacaggcacgtggcaccatgcccagctaatttttgtatttttgtagagatagggttttgccatgttgccctggctggtcttgaattcctgggctcaagcgatttacccacctcagcctcccaaagtgttggaattacaggcatgagccactgctcccggcccactcttattttatagatgaaaaaattgaggcccagaaagrttacgtgatcacaaagccataaacaggacagcaaggggtcaatcctggaagtttgattccagggcccagctataatacatggcattggctctccagccctgctttctccacgcaatagatactcaatagatacgcaattgataactattagtagcagcattctgttgggatgttaagaatttgtttttctttttcttttttttgagacagagtctcactctgttgcccaggctggagtacagtggctcaatctcaactcactgcaacctccacctcctgggttaaagcaattctcctgcctcagcctcctgagtagctggaattcagtgctctctacccattgccgtgtggacgagccatcaggtctcacttaagcccacaatgcagaggasgctcggttaaaattactccagatgctttattcagattgatataagcatattaaaactgtctcccagattgaggatccccatccttttcagtcaatttaccctcagactatgactttyagcttgctcctttattacacaagcaaacaaagatgaacctttagttccccaaaccattcagtgccccaaaccaggtggaattgttggtattctgaaatgcgcatcctaggccctagcccccattggctgaggataacatcctgggaaggccatctgcccgtaagtgatgacattatttatcctaattcccccactagttgatttatttcagaaacagagtctcactacatcttgtcttgcccaggctggatttgaactccatccagtcttgcccaggctggattcgaactcctgggctcaagtgatcctctggcttcagcctcctgagtagctaggactacaggcttgcatcaccacacccagcatttaattcccccatttaaaaagtaacctgggctgggcgcagtggctcacacctgtaatcccagcactttgggaggctgaggtgggaggtgggcagattgcctgaggtcaggagttcgagaccagccttgccaacatggtgaaaccctgtctctactaaaaatgcaaaaattacctgggcatggtggcgggtgcctgcaatcccagctactcaggagacagaggtaggagaactgtttaaacccaggaggtggaggttgcagtgagccaatattgcaccactgcactccagcctgggcaacagagtgagactccatttcaaaaaaaaaaaaaaatgtaacctgggcagtgcagtatgcaccaactgtcattgatttgttcgacatagggataagaggttacagtagccagtggtcaaaagatgcaaaccataaccaaagatctctgtaatctcacggttgcttgtgtgagtcagataggcagcctttggaattttaatcaggcaaatgacaccagaggattttcatctattgcatcattccctttttaatctgagcacattagcgtctacattccaggcctgagtaaggtgactaaaccaggaagtttaatgattacagagatcacatgcatttggagtcatctagctcagccctctcactttatagaatcaagacaaaataattaggttattttatcattcctcatctgattactccaattcaagtcttgggatttttcacccttactacagttctattggctattcaaggatatctaggtttaaatcttataagtagttggattttgcttaagaacacccatttgagggcygacactgacaagtgacattttagttaaagcgtatcacccatctggcccaaatcttccatgtaagaagggaaactctcccatctgtagacacatctccgtttcatagagctccactttaatctacacggtcmgttttggcaaggctcaaagataatttctgtttctctttaagtactgagtatggtgggaggactagaagtccagcaaaatttacctatttatttagcaaacacttccccatggggtttactagatrtcttacgatattaattccacagtaactgtcattctccctattttacagatggagaaaccaaggcacagagcccaactgggacgcagtgaaatcgagatttgaacgcaggcagtctagctgcagagttcttgcttgcccgctgtgctacactggctaggctggaaacaaggcacggggagacttggggcctcagctggaaaaatggccctaagctctttctaacacagtggaaagtgcacaggccctggggtcctactttggcttttcttaaactgcaggtaaaggtccaagtctatattcatatctgtaaaagcttcatagctatgtcagtggtcacagtgagaaagaaagcaaattatcacacaaggaaaggcatgtggtctacagtgggcacactagaagcatctcctgaagctcagcctttccctggctggggacccctcttcgctcacccaacttggtctcttgggataagaaaatgtgtgcagacctttcagtccactcagtaaggcatgatcctaaaccattagaaagtacctgttccatgtactggaattaaaggaacagttgggaattttatggaaattctattcctgttactaaagaaaacagctcttgaattctgccctgtattctttttaatggtaagtccaaagttaartcgtcataacataaatcartgtgacctgctggtattccacttgctgcaaaagaatcagaaactgtgtgggagagcaaacttccataataagaaaaccaatgtagagacttccaaacgctgccagtggttacagtcacaatggtgtctctatcggagcagccacaaatgaagcagaaatgctaacctcagcaagtttcaaaagaatgctgctaatcatttttacaggtttattctgaaccgaagacaaggaatgctcaggaagaaattctgacacgatttctaaatcacaactgtacattaagggtcatatttgcaaaacacctatcaaggaaagaaaagccatacaagaaaatgcagttcatgtgacttttaacatttttcagaataattacaatctcaattgcacaaaataaccaacttttcaaagcaaatgagacttctggttaaacacggcattaacctacaaggacaaaaagaaaggaaacagtgactgataagagatcttaacataattctggaagacaggaagctcacrgaagtaattgcttagtagaggaaacactgaaacctgagtgcccgcagagggtgactcgggtgagaaaggagctgtgacgtttgtaaaactctaaaatgctcaggaatcagaggtctggggcaagacatagagccaaaaacargagattggttaaaaagctatataaaaaagcttggccaggcacggtggctcacccctgtaatcccagcattttgggaggccaaggcaggtggatcatttgaggtcaggagttcgagaccagcctggcccaggtggtacccccatccctactaaaaatacaaaaaaaaattagccaggcatggtggtagacacctctaatcccagctacccaggagactgaagcacaagaatagcttgaacctggggaacagattttgcaatgagctgagattgcaccactgcactcaagcttgggcgacagacccagactccatctcagcggaaaaaaaaaaaaccccaaaaaaacccaaacccacaggtatggaaaagggaaaactatagagacagtaaacaagtcagtagtggccagggatttggaaaggtgggggatgctgaataagtgaaacgcaagggcgtttttagggcagtgaaactattctgtatgacactgtaacggcaaatacatgacacactttcaaaacccatagaatttgacagcacaaagaatgaactttaatgtacatacattcaaaaaaacatttaggaggtcagcgacgcaacacagactgtgacatgagtctaactgtgttgcaagtgtgtgaaatagcctcactgaaggggaaggggagggaaaatatgctgacctaagaaactttggaaattaatagagtaagactacaagtaaaaggaagtgtatgtagcactgtattctgattgataaagttgcttcctgcaagagcacgcttaacaattctgaaaccactacacaagaatactggaattgaacaattaagtacatggatggtggatggcgggagggaggtttcttgctgctggagtgagaggcttcaagcaggggagaaggctagaatgatccatgtcactggattagaattgaggacatcagtatacactcatgtttagcttgatattcatatagatgactatacatatatgtttatataaagatttgaagacgtgtatatagcttagtatacacgtgcatatgtccttgctttgtcagctgagaaacactagaagtaatgacacccagtagcaacaagcacacctagtgcccagatcaaagaaccaggtctatacaagatggtcctggcgcatcttgtagtgccagaaaggaaggaagtaatcaacaaaacaaaaaccaaatgatacggatgtgtcaaaggaacacaggagccaactgaaagtgaaaaagttcctaataaccaaagctagaaaacattgataggagtgttaaaaaaaagaaagaaagaaaaaattgggcaagataaagtatgattggattataacccaaagtctacatttccattagcccatactgatgttaacaaataattgtataaatatataagtgagggagaaaggaccaatctcccatgcagaagaatgaacacagatactccaccctcaaagaggtggagcacagtatacacagtgattctttccagacagttcagtatggaaaatgagaaaagggtaacatgacagtgaagaaacctgacacgttgtcctcaggcatgtgatgaaggtcaacttcagcagggtgaagtcatgttgacagtacagatccgtgatatgaggtgataagaccagcaccttacctctgggctctttctcccaaaacccaaaccctagtctaatcataagaaaaacatcagacaaatcccaactgatgaatagtctatagaatacgtgattagtacttaaagctgttgagatcatctacagcaagtctgagaaactgtcacagccaagaggagcttaaggagacgactaaatgtcatgtggtgtcttggatgggatccaaaagagaagaaggccactgggtaaaaactaaggagatctaaaaacctgtggcctttagttaataataatgtatcagtcttggttcattaattataacaaacgtaccatactaatgtaagatgttaatgggggaaatgtaagatgttaataggggaaatgtgttgggtatatgggaattctttgtattatctttgcaatttttctgcaaatctaaaactatcctaactttttttttttaagtttatgtttaaaaaaccttacaggccaggcgtggtggctcacgcctgtaatcccagcactttgggaggccaagctgggtggacctcctgaggtcagaagtttgagaccagcctggctaacgtggcgaaacctcatctctaataaaaatacaaaaattagctggctgtggtggtgtgcacctgtagtcccagctactctggaggctgaggcaggagaattgcttgaacccaggaggcggaggttgcagtgagctgagatcacaccattgcactctagcatgggcaacaagagcaaaactccatctcaaaaacaaacaaacaaaaaaccttacagatactgcctggcatgttggctcatgctagcactttgggatcacctgaggtcaggagttcgagaccagcctggccaacatggtgagacccagtctctattaaaaatacaaaaattagctgggtgtggtggtgcacgcctgtaatcccagctactcaggaggctgaggcaggagaattgcttgaacttgggaagcagaggttgttttctgtttatttgtatatttgtttgttttttgagatggagtctcactctgtcgcccaggctggagtgcagtggcacaatctcggctcactgcaacctccgcctcctgggttcaagggattctcctgcctcagcctcctgagcagctgggactacaggcacgcgccaccatgcccagctaatttttatatttttagtagagactgggtttcaccatattggccaggctggtctagaactcctgacctcatgattcactccctcccaccccactggcctcccaaagtgctgggattacaggcgtgaccactgcacctggccttgggtggcagaggttgtatgaccagagttcatgccacagcactccagcctgggcaacagaatgagactctgactcaaaaaataaaataaagtaaaataaaccttacagatactgacatttagggaatcatttaaaaagccagcttatcatccaatcaacctgcataaaaactgaaaagacattaggcctataaacagagctctccattagcttatttcttcacttttaaacatagacacaggcaaggatcgctagacacatgagacaagtttccaacaataaaggtagaaatcaaaccaagctgggaaaaaaaaaaggaattagaataacgtaagaaacagaagaaaacttaaaaattactttatctagagatactataggtggaggtttatctatttttttgagacagggtctggtactgtcacccaggctggagtgcagtggtgccatctcagctcactgcaacctccgcctcctgggctcaagtgatcctcccacctcagcctctcaggtagctgggactacaggcgcacatcaacatgccgggctaatttttgctttttttgtagagacagggttttgccatgttgcacaggctggtcttgaacttctgagctcaagcgatctgtccgtctcagcctcccaaaatgttgggattacaggcgtgagccactgcacccagccaggtttatgtattttaaagctgtgaaacaggggagggaaatctcagcatgactcccttatccatttgcctgtcccatagcaaatctctacttttcattacatcctaataggtttgagttagacacacacagaatgactgcatcataattacagactcccagttttgagtcataagagactctaatttgtgatgatagttttatatatttgtgatttacagtcacttttcaagagtttcattttgcagatttacactcttccatatatataacatacaaaacattacaagtcactggatattattcccagtcattttctaatcacattttattaaattatcaggtctgtatagtgataggttgagattagtctctaagccttagtccacatcccatgtttaagttcagtggaatccataataatccacggagggctctcaggtgagtacttcacaatccgtgagaagactgcaaggacaggaaagagctgtctctcacaaagagtgacatgaccatagtgaaatggaaatgaatgcctggaatttagctggccctgaagcccacaaagaaagataagtgacatgacaagcttgttgcagagaaggaagactaggctgctttcttggtgacaattttaggtacactgaagataattctccagggccactccaattctatttttcctgttttgcttcacatgctgccatcttttctttagtctgtctcttcttctaaccacagttccctcctttccctccaaaggaaggagacgtgaaagggcaaactatcactataaatgctcgttagctgaatgttcaagcagcccttcctttacaggacctcccacccccacctctcttatttgaggctttatttatttacttatttagagacagggtctcgctctgttgtccaagctggaatgcagtggcatgatcactgctcactgcagcttcaacacgctgggctcaagtgatccttccaccagagcctcccaaggagctgtactactggtgaatgccaccatatccggctaattttttaaattttttgtagagatggggtctcactgtgttgcccaagctggtctcaaactcctggcctcaagcaatcttcctgccttggtctctcaaagtgctgggattacaggtatgagccactgcacccagccacttctttatttaacatattcaggacttttcacttgccttagtttttaagtgtcttgcctaagtcctttctctgacttaacaactctggcccccaaactggagaaaatgggagagttaacagcattctaagtgatgcaccccatcacttacatacgatgggaccaaatccactatttggttcagttcataggtatttcttgtaaccatctggacaagaatgattatgtctgctatggtgtaagtcacaggggtaagcaaattctagaagctgcagttgccccactgcagaatatcaagagataagcccttccaggcatttcactagtttatccataagcaaggaggaaatagagtcagtgccacccactcagcctttactcccatgaaggcaaaggtcagaatgaagattgtcatctcagttaaatgttacctctgaaccaccaaagaaaaaagcagagagaggttgcagatctggctacgttccctcacccaatttgagtcaaatcatatttaatccctaccaggaggtcagccccaattcaatagttgctcaagaaattagttcagttgtcagaataatctgagagctcaattcacagcccagactggacccaaaccttcaggttcatttatataataaaatgcttcctgtgtgccaggccctgtgctaaatggcacgtgatcacacttaacctcccaaacaactctaagtgagcatactgaccattttcttcagatgtgagatcaagcccagagatggcaaggctgctaagctgtgatatgaaaaggaaccacatctgtctaactccaaagcctccacctttaaaccccttttagctaggtttctgaacagggttgaaaacttcgttgaacaagtgtaggctggcctttggacaagggaagaccaccctacctaaaacagcccttccctgccactcagcatcactctttccttattctttctagcattcatctctaaaattacacccattcatctcacaaagaatgattttgcttctgctatattccagatactgtggatgcagtagtgaaatagactacaatctctgccctcaccgatctgacaggatttatttgttaacctgttcctgtctctcctaccaaatatgagatccatgagggtagaagattgtcagtcttgcttactgcatatttccagcacctaaatagcctctggtatatgggtacaacagacagcaatgtttgtcaaagaactgcatccatgacatcctcagcatggcacaggaaactggtcaaacaattcaccaaagtgattttattcccatgcagagttccttatagtgcactgtct

SEQ ID NO: 97389 - DNA, 31732 bp, Homo sapiens
tcagtccatctcctgtaagaacccttttgtctacctcttccatcccaccctccactccacatctttccacccctcctattacccaaggaagtttgtgtccccttgtagaatcacaccaccaagtccctgcccacaaaatagatgccttgcctccacaaaccataacctaggggaggtttagccacaagacagttccctaactctgcccctcccttacaggagatccctactgagcactgccctctatgtctagttattagaaccaagaatgacctggaaactatgagtctaacacattctcttctttctccagggcttcagtccttacaatgtcagtaaaacagccttgctgggcctcaacaataccctggccatagagctggccccaaggaacattagggtgaactgcctgcacctggacttatcaagactagcttcagcaggatggtgaggaaggggagctttgcatttgactgggaccccttgaaaggcatccatcttcttggacagggaagcccactacctgagtcctgagctctcagccactccattctccttccctggactttcccatattccctctctgtaccacctgccctatacaagccacactcttatcacaccttttctgaggtataggctggagactgaggtattcagactgtactcacactgtttcctccctccttacatggatgagaattggagagacgcagcaaaatgcatcactagaacctgaaacaaatgaaacagatgagggcagtggggagagctgggagctagaaaaaaataggaagtgaaagagggaagtctctcaccccatccctcctctcagttaccatgaggatgggcagtttcttccctttccattcttcactttcctcttcttttttttttttttttcttttttaattattattattattatactttaagttttagggtacatgtgcacattgtgcaggttagttacatatgtatacatgtgccatgctggtgcgctgcacccactaacgtgtcatctagcattagatatatctcccaatgctatccctccccactcccccgaccccaccacagtccccagagtgtgatattccccttcctgtgtccatgtgatctcattgttcaattcccacctatgagtgagaatatgtggtgtttggttttttgttcttgcgatagtttactgagaatgatggtttccaatttcatccatgtccctacaaaggacatgaactcatcattttttatggctgcatagtattccatggtgtatatgtgccacattttcttaatccagtctatcattgttggacatttgggttggttccaagtctttgctattgtgaataatgccgcaataaacatacgtgtgcatgtgtctttatagcagcatgatttatagtcatttgggtatatacccagtaatgggatggctgggtcaaatggtatttctagttctagatccctgaggaatcgccacactgacttccacaatggttgaactagtttacagtcccaccaacagtgtaaaagtgttcctatttctccacatcctctccagcacctgttgtttcctgactttttaatgatcgccattctaactggtgtgagatgatatctcatagtggttttgatttgcatttctctgatggccagtgatgatgagcattttttcatgtattttttggctgcataaatgtcttcttttgagaagtgtctgttcatgtccttcgcccactttttgatggggttgtttgtttttttcttgtaaatttgtttgagttcattgtagattctggatattagccctttgtcagatgagtaggttgcgaaaattttctcccatgttgtaggttgcctgttcactctgatggtagtttcttttgcggtgcagaagctctttagtttaattagatcccatttgtcaattttggcttttgttgccattgcttttggtgttttggacatgaagtccttgcccacgcctatgtcctgaatgataatgcctaggttttcttctagggtttttatggttttaggtctaacgtttaaatctttaatccatcttgaattgatttttgtataaggtgtaaggaagggatccagtttcagctttctacatatggctcgccagttttcccagcaccatttattaaatagggaatcctttccccattgcttgtttttctcaggtttgtcaaagatcagatagttgtaggtatgcggcattatttctgagggttctgttctgttccattgatctatatctctgttttggtaccagtaccatgctgttttggttactgtagccttgtagtatagtttgaagtcaggtagtgtgatgcctccagctttgttcttttggtttaggattgacttgccgatgcaggctcttttttggttccatatgaactttaaagtagttttttccaattctgtgaagaaagtcattggtagcttgatggggatggcattgaatctgtaaattaccttgggcagtatggccattttcacgatattgattcttcctacccatgagcatggaatgttcttccatttgtttgtgtcctcttttatttccttgagcagtggtttgtagttctccttgaagaggtccttcacatcccttgtaagttggattcctaggtattttattctctttgaagcaattgtgaatgggagttcactcatgatttggctctctgtttgtctgttgttggtgtataagaatgcttgtgatttttgtacattgattttgtatcctgagactttgctgaagttgcttatcagcttaaggagattttgggctgagacgatggggttttctagataaacaatcatgtcgtctgcaaacagggacaatttgacttcctcttttcctaattgattcctcttcttaaacataaagagatttctgggtggggtggctcatgcctgtaatcccagcacattgggaggccgaggcgggcagatcacgaggtcaggaggtcgagaccatcttggctaacacggtgaaaccccgtctctactaaaaatacaaaaaattagccgggcgcagtggcgggcgcctgtaatcccagctactcgggaggctgaggcaggagaatggcataacccgggaggcggagtttgcagtgagccaagatagcgccactacagtccggcctgggcaaaagagcaagactccgtctctaaaaaaaaaaaaaaaaaaagaaaggaaaagaaaaaaaaacataaagagatttcccttcttcctacagctctggatggacaaggaaaaagaggaaagcatgaaagaaaccctgcggataagaaggtaaactgtcatgagggcaagggcactaagagacatgaagatgggaaggtctggtccctagcagcccacagcccgctgtctcagtcccacagataacacaggcaggctctcttctgcctcacagaccacgaattcataaacactatcactacagtgacctgagcaagaagtcagcttccctttccaaaggtaaacacagagacatcggggtttcagcagtgcagaggtctcggagaagccctgagtcctctctccacctgggggattgcctccacctctgagcatccatggagaccagggaccataaccaaaaccatgctttgttagtccccttgaataatgacacatgtttacaaaactcaggttgatgatctacaatccaaatgaaaagaatgaagagttttactaagccccaaactccccttgcctaaggagttactttcttccccagtgagctgggtgaactgttcaagcacctttgtcgggctccctttcctctaagttccctgcctctctctaccttctggcttcaaggacaaatgccagtaatgcctaactctgtactcgtccagacatcccaaatcttcccaaagccattctgatgtgagacatgagctgcaggcctggttcataactcattaataagtgaggggattgtcaacctagagcaccaatgaatgatctagcccatgtagctcaatactggattcacattagaatcacctggggagctttttaaactgcaggtgctcaggccccacccactcccagagattctttttaattggtccaaggtaggacttgaccatctgggcttttgtttttctttgtcttttcttttcttttcttttttggtttaagcctctcaaatgattgcaagatacaagtagaatggagaagcattaattcagcccttctaggtttgagttactcactctgcccacctctagagcattctatggcagggagattaaagtgtctcctaactatgcagtcactgataaaataagaattagcacattctcactaaatgaacctgactttaaggcacaagtatagattcctgaaaaagttctaagctgaacctgtacaaatggaatcattttaaacacaccatttactgtcacacagactccctgatactttagtgtgtgcacatgtgaaaccatttttttgaagtatgaaataattgctcaccattttatctatataactttggattttggtgtcctgagctctctaaaaaccggtgtgtttctatagtatttgaatattatgggtaatagttttgcagagtacagtatgcttatactaaattataacagcatatcctcgtggtaaccctatttgataggcagaaagcttgtacactgatcctgaaaagtcatctgataattcttgattaagcaaatttaactccccgtgtcccaggtgagggaggcagacccgtttgatttttacctccttccttgcttcccttattccccaggttaggcgagccagaggattgtgctggcatcgtgtctttcctgtgctctgaagatgccagctacatcactggggaaacagtggtggtgggtggaggaaccccgtcccgcctctgaggaccgggagacagcccacaggccagagttgggctctagctcctggtgctgttcctgcattcacccactggcctttcccacctctgctcaccttactgttcacctcatcaaatcagttctgccctgtgaaaagatccagccttccctgccgtcaaggtggcgtcttactcgggattcctgctgttgttgtggccttgggtaaaggcctcccctgagaacacaggacaggcctgctgacaaggctgagtctaccttggcaaagaccaagatattttttcctgggccactggggaatctgaggggtgatgggagagaaggaacctggagtggaaggagcagagttgcaaattaacaacttgcaaatgaggtgcaaataaaatgcagatgattgcgcggctttgaatccaattgacctgttcatttctcagtgttgggtgcttagctgagcagagagcagaagtctattcaggctggatctctggatcccccagccctcctccctgtctccagaacttgagcgtgatgttcacgggtggaggtgtctgcagagctgccagctggaaggaaggtggcacgggaactcccaggacgccacgggaatccccgaggcagcgcgagcccggagagagtggggaaggatgaactctctaacacctccccgccccttgcctcccagatcaggccaggtcctctccccgcatggccctacgacccgagttccctcccgagtcagcaagtacaagctggatgggtcctgagccggtggggaatagagaaaggccctgcaaggtacccaggcccacaaacaaaagcaatgggttctgcccacgggcccgaggattcagtagaaggaaagtggggacgctgtcccccgccccaaaggcactgacactgggcgacacacgctgagcctctcacgccgacgggcctctcacgccggagccggcaagaaaggtcggcgccagcccgcgggctctcaggaggctcggcagcgcgacgcgcatgctcagtcgggcagctctccgggccggcgtgggagcccgcgctccaaagcccggtggggggaggggcgctcacgcaaccgccactgtctggagcgggctcgcctctgcggcggcactcaccgcccgggctttactgaagcggagtctagcatgtgcggctgctccacagcggtgtgggtggcggcggctcctctgcagcagcctcggcagtaggggtcasggtggccaagcccaccgtggagctcatctgagagttgtaaggtacgggactgcctcggtctttgggacgccccgtctggtagcatcccagatccagcacgttccttccggccctgcaccccggcccggtgcctcacaccccgctaccccatgcatccagactctaaggcagcccctgcatctcagtcctgacatcgctgtccctggagcatcctccgctggagctggagcttgacaggtagggtggagagggccgtggggggggtgcsgaaactgcatcaattaacggggccgtgggggagggaagtcctccattgctaaggcttcagtaggcgttctatgatcacagtgtaaacaaagctgcagggaagctctaactgggcggaacccaccgcagctcagcaaggcctactgcctctccagattccacctcaggggccagggcatatctgarcaaaaggcagcrgacagcttctgcagacttcagtgtccttgcctgacatctctaaagacagcagtggttctcccagcacggagttcgtgctccgataacggacagactgcctccccragtgggtccctgacccccatgtagcttgactgaaaaacaccgmccagtaggggcggagagacacctcatacaggtgggtgcccctgtggaacaaagcttccagaagaaggatcaggcagcaatatttgctgttctgcagcctcctctactgatacccaagaaaataaggtctggaatggacttccagcaaacccccaaagacctgcagctgaggggcctgttagaaggaaaactaacaaacagaaaggaatagcatcaacatcagcaaaggacagcatcaacatcagaacaggaaaggacatccacactaaaaccccatccataggtcaccaacatcaaagaccaaaggtagataaaaccacaaagatggagagaaaccagagcaaaaaggctgaaacttccagaaatcagaacgtctcttctcttccaaaggaatacaagtcctcaccagcaagggaacaaaactggatggagaataagtttgatgacttgacagacgtaagcttcagaaggtcagtaataacaaactacacccagctaaaggagcatgttctaacccattgcaaggaagctaaaaaccttgacaaaaggttaaacgaatggctaactagaatgaagaatctagagaagagcttaaatgacctgatggagctgataaccacagtacaagaacttcatgaaggatacacaagcttcaatagctgattcaatcaagtggaagaaaggatatcagtgattgaatataaaattaatgaaataaagtgagaacacaagattagagacaagaaaagaaaaaagaaacattcaaattcaggaaatacagagaacatcacaaagacactccttgagaagagcaaccccaagacacataattgtcagattcagcaaggttaagggcagccagagagaaaggttgggttaccaacaaagggaagcccatcagactaacagcagatctctcagcagaaaccatacaaaccagaagagagtcgggaccaatattcaacattctgaaagaaaagatttttggaactagaatttcatatccagccaaactaagcttcgtaagtgaaggagaaataaaatcctttacagacaagcagatgctgagagagtttgtcaccaccaggcctgccttacaataagagctcctgaaggaagcactaaacatggaaaggaayaaccagtaccagccactgcaaaaacatacgaaattgtaaagaccattgatgctatgaagaaactgcatcaattaatgggcaaaataaccagctaacgtcatgacaggatcaaattcacatataacaatactaaccttcaatgtaaatgggataaatgccccaattaaaagacactgactggcaaattggataaagaatcaagacccatatggtgtgctgtattcaggagacccaatctcaygtgcraagacacacataggctcaaaatgaaggtgtgtctggaattggtgggttcttggtctcactgacttcaagaatgaagccacggaccctcgcagtgagtgttacagtccttaaaggcagcgtgtccggagtttgttccttctgatgttcagacacgttcagagttttttccttctggtgggttcgtggtctcgctggcttcaggagtgaagctgcggaccttcacagtgagtgttacagctcttaaggcggcatgtctggagttgttcgttcctcccatccggagttgttcattcctcccactgggttcgtggcctcactggcctcaggagtgaagctgcagaccttcacgrtgagtgttacagctcataaaggccgtgtggacccaaagagtgaggggcagcaagatttattgcaaagagcgaaagaacaaagcttccacagtgtggaaggggacccaagcaggttgctactgtttgaaggggtggcttgcccctccacacctgtgggtatttctagtcaggtgggacgagagactgagaaagagaaataagacacagagacaaagtatagagaaacaacagtgagcccaggggaccggcgctcagcataccaaggacytgcaccrgcaccggtctctgagttccctcagtttttattgattattatcgtcattatttcagtaaaaaggaatgtagtaggagggcagggtgataataaggagaaggtcagcaacaaacgtgagcaatagaatctaahaattcagttcaagggaaggtactatgactggacatgcacgtaagccagatttatgtttctctccacccaaacatctcggtggagtaaagaataacraggcagcattgctgcaaacatgtctcgcctcccaccatagggcggtttttctctcatctcagaactgaacaaatgtacaatcrggatytataccgagacttttagttcccaggagcaggcaggagrcagtggccttcctctatctcaactgcaagaggccttccttttttactaacccaccgcagcacagaccctttatgggtgtcgggctgggggacagtcaggtctttctcatcccaggaggccatatttcagactatcacatggggagaaaccttggacaataccctgctttcaagggcagaggtccctgyggctttctgcagtgcactgtgcccctggtttattgagactagagaatggcgatgacttttaccaagtatactgcttgtaaacattttgttaacaaggcacgtcctacacagtcctagatcccttaaaccttgatttcatacaacacatgttcttgtgagctccaggttgggtcaaagtggttgggtcaaagtggctggggcaaagctaaaaattaacaacatctcagaaaagcaattatttaaagtacaggtctttttcaaaatgtagtctcttatgtcttccctttctacatagacacggtaacagtctgatctctctttcttttccctacatatcccccttttctttttgacaaaactgtcattgtcaccatggcctgtttttgctggtcactgtctttctggaactgctggatacacctgtagactaacaatagagagggcagacatacaaggattaatacaaaatttgcaatagtggaatttccaatggttttaacccaagtgatgggggcaagaggacagtgtgggtgctccggcacccaggcagtctcccttctcctttgtctcttagttgttgtttctcatagttttcaatctttctcctcacctgctcactcgcactttttgtttcattgtctcccttctcttatggtctctctctctttttctctttttcttccttttacactatttcttttcccagtctcactttctgtgtctctctctgatctctgtctttctcttttacattatttttttccccagtctcaccttctgtgtctttctctgatctctgtcttttccagtctctctcttactcattttctccctctctttctctctctctctctctctctctgtctgtcatcccgtgtcctctctccttcacactcagtctctttttctttttctttttctccctggctctccacatctgccgttttctctcctttctctttctgatttctcttctcactttctctcttcctttctttcccagtttctcttttttctctgttggtctttcccaaataatgaaaaggagtggaggtctgaatgttatcagatgctattgtcaggcctgcgtttgcaacctctgtctgcagaaatgtgtaacagtcaattaatttgtctctcgtttctgcagcactcaaaatatcatcaacataatgaataatataacagtctgaaaacttgtctctaactggttgaagaacttgagctacaaaagtctgacaaatagttggactattaagcattccctgaggcaacactttccgctgaaatctggtggctggttttttattatttatggctggtatagtaaaagcaaatttttttaaatcctattttgccagaggaatggtaaaaacgcaatcctttagctcaattataattaaaggccaatctttggggatcatggccggagaaagcagcccaagttggagagtccccatgggttgaattactgcattgwtggctctcaaatcagttaggatgcaccatctgcctgattttttcygaattacaaacgcaggagaatgccaaggtgaaaatgaaggctcaatgtttcccttttctaattgttcctttgccactaagtgtaaggcctccagtttttgctttggtagtggccactgatttacccatacaggcttttctgttttcccagttaatggaatgggttttggaggctctacagtggccactcctaaaaaggataccctatttcttttttttttttttttttggatttttttagcctcaattgggactttaatgccttctccatttttccctagtcctttaccagagagatatcccattttagtcatgattttttgactcgtggggctgtatagggagactggaatagtaatctctgcatgccactgttctaacaagtctcggccccataagttaattggaatagaaataatcataggctgaactgtactctcttgattattagggcctagacaatgtaaaatcatggcactttgatacacttctgaggcggtgcccacaccaacaaatcctgtaacaggcttttgtttaggacaattttttggccattgatttaagacaataatagaaacatcagccccagtagccactaatccttcaaactgctttccctgaatagtgactgtacacacaggtctattctctgagagctgactagcccaataaacaacttttccagcagggttggtacttccaaaccctcctgttctttctgttttgctattcccaattttaatataaggcaaaagcaataattgagcaattctatcacctggattggcactccagggaacagcagagctgatcactaactgaatttcccctttataatctgaatcaattaccccagtatgaatttggactccctttaaatttagacttgatcttcctaaaataaggcctaccatcccttctggcagcaggccatacaccccagtaggaatcttttgagggagcactccagggagtgaagaaaccatttgagtagaacataaatctactgctgcgctgcctgctgtggtgggggataactgttgtattgttgtaattggctgattccctggaatggtggtatttactgtgggggttgttgtccctgaaaaccctgaggaacaaatggctgaatcaagaatgccccactttgttgcggggcctggggctggtccctcttctcgtttcctgacaatggttgcccatttttatcaaatttagaacaacattccttagcccagtgttttcctctttcacattttggacacaggccaggtggctgtttatttttgttctgtttatttaagactgggcaattcttttttagatgaccgatttgaccacaattataacattttcccccaaatgttttaacttgtcctcctaaagcaacccccgtaattgcttgagccagtagcattgccttatgcatagttcctccaatcccatcacaagccttcacatattctgtaattacatcaactcctgctgaaacctttcctcttaatggctttatggccaattgacatcctggatttgcattttgataacccattatttctacaacaactttttgggcgttatcatctgcaatcgatttttgagctgcatcttgcaaccttgccacaaagtctggatatggctctttagagccttgtctgattgaactaaaagaagggcaggaggttcctgggtcctgaatcttttcccagaccctgaggcaaatagcccttaattgttcaatagcctcattctgcattactgattgttggttaatagtgctccaatttggacctgtttctggcaattggtctgcatctatattaacaacaggattagtagcctgatttttccatacctgttcttgtactccgtcartccaccaggttttaaattgtagatactgagagggtgaaagagaagatttagccaaaatttcccaatcataaggaataagtctattcccattagcaatggaatctaataatgttctcatataaggagagttgggtccatattgtttaactgcctccttcatatcttttaacattttcatggtgaaagattcatatctagcctcagtttggacagacgctcctgcttgactccgttttccagccggtattggttgtaaaattaccaggaactgccctgcctcaagatctccctgttttctggctttatcaatgattttttgcagtgcactatcttgtccactaggtggtagtgtaggatcaaacaccatcgccatgggttgttgctatactgccctgctatttggcacaggacacaacacctgggatctatactgaaccactggagacggccgatactgaaattcggctgatggctggtgttcataaactactgatggttgggttttattttctaccggctgatattgtggatactgtgtctggattggcatttgaggttgtaatgtcacaggcatctgaaccgtgggagaaggagttgttggccatcgtggtctaaactctgatggaccaaataattctggacctccttcctccaattttgatgatttaggatatattacctcctgtaattgattatagtcaacattttgtgttgaccgaaccattgcagactctactacatttttacaatgtgaactttctgttccattcttgaactgtcttcctacctcttcttcacaaactattacacagctttcaggggcatcagaaactgaaatgctatcttcttctatttgaaatagttctcaagttgctttaataatagcccaatcattccatgctgtaagtgggatgattttaccttccctacttgcttgttttaattctttgctaatttttccccagtcttttaaatctaaagttccctgttctggaaaccatgggcagaattgttctattgtttgaaatagcataattagattctctgtagaagcttaaactcccygtcttaagagaattttaatgaagctgagataagaggcatatttacttccagtttgccccattgttaccctggattcctccaagtgcacaagcttaccgcaaggctgaccgtggatgtactcgggaatctcttgttggctgtcctcaatactcacttagcgtactttcaccctagagaaaggccccatgttggatgccagatgaaggggtggcctgcccctccacacctgtgggtatttctagtcaggtgggatgagagactgagaaagagaaataagacacagagacaaagtatagagaaacaacagtgggccgaggggaccggcgctcagcataccaaggacctgcaccagcaccggtctctgagttccctcagtttttattgattattattgtcattatttcagtaaaaaggaatgtagtaggagggcagggtgattataaggagaaggtcagcaacaatcatgtgaggaatagaatctacgtcatamttaagttcaagggaakgtactatgactggacgtgcatgtaagccagatttatgtttctctccacccaaacatctcagtggagtaaagaataacaaggcagcattgctgcaaacatgtctcgcctcccaccatagggcggtttttctctcatctcagaactgaacaaatgtacaatcgggatttatactgagacatttagttcccagggacaggcaggagacagtggccttcctctatctcaactgcaagatgctttcctcttttactaatccacctcagcacagaccctttatgggtgtcaggctgggggacggtcaggtctttctcatcccatgaggccatatttcagactatcacatggggagaaaccttggacaataccccrctttcaagggcagaggtccctgtagctttccacagtacactgtgccactgagcccacacccacccagaactagcgctggcctgcaagcactgtgcacagccccagttcctgcccatgcttctccctccacacctccctgcaagctgagggagccagctctggtcttggccagcccagaaaggggctcccacagtgcagcatgggctgaagggctcctcaagcatggccagagtgggtgccaaggccaaggaggcgccgagagcgagcgagggctgccagcacgctgccacctctcaaagggatggaggaagatctaccaaacaaatggaaagcaaagaaaagcagggattgcaatcctggtctctgataaaacagacattaaaccaacaaagataaaaggagacaaagaaggccatcacataatggtaaaggratcagttcaacaggaagagctaactatcctaaatatatatgcacccaatacaggagaacccagattcataaagcaagttcttagagacctacaaagaggcttagactcccatacaatagtaatgggagacagtaacaccccactgttaatattagacagaaaacatgacaaaattaataaggatgtccaggacttgaactcagctctagaccaagtaggcctaatacacatctacagaactctccaccccaagtcaacacaatatacattcttctcagcaccacatcacacttattctaaaattgaccacataattggaagtaaaacactcctcagcaaatgccaaagaacagcaatcacaacaaactgtctcccagaccacagtgcaatcaaattagaactcaggactgaaaaactcactcaaaactgcacaactacatggaaactgaacaacctgctcctgaatgactactaggtaaataacaaactgaaggcagaaataaacatggtctttgaaaccaatgagaacaaagacacagtgtagcagaatctctgggacacatttaaaacagtgtgtagagggatatttacagcactgaatacccacaagagaaagcaggaaagatctaaaatcaacaccctaacctcaaaattaaaagaactagagaagcaagagcaaacaaattcaaaagctagcagaagacaacaaataatgatgatcagagcagaactgaaggtgatagagacattaaaaaaaaaaccttcaaaggatcaatgaatccaggagctggatttttgaaaagatcaacaaaatggactgctagcaagactaataaggaagaaaagagagaagagtcaaatagacacaataaaaaatcataaaggggatatcaccagtgatcccacagaaatacacactaccatcagagaatactataaacacctctatgcaaataaactagaaaacctagaagaattggataaattcttggacacatacaccttctgcagactaaatcaggacgaagttgaattgctgaatagaccaataacagcttctgaaattgaggcaataattaatagcctaccaaaccaaaaaagtccaggaccagatggattcatagccgaattctaccagaggtacaaagaggagctggtactattccttctgaaactataccgatcaatagaaaaagaaagaatcctccctaactcattttataatgccagaatcatccggatatcaaagcttggcagagacacaacaaaacaaagaaaattttaggccagtatccctgatgaacatcaatgcaaaaatcctcaataaaatactggcaaaccgaatccagcataaggatgcattctctcaccactcttattcaacatagtattggaagttctggccagggcaatcaggcaagaggaagaaataaagggtattcaattaggaaaagaggaagtcaaattgtctctgtttgcagatgatttcaccgtatatttagaaaccccatgatctcagcccaaaatctccttaagctgataagcaacttcagcaaagtctcaggatacaaaatcaatgtgcaaaaatcacaagcattcctatatgcaaataatagacagagagccaaatcatgagtgaagtcccattcacaattgctacaaagagaataaaatacctagaaatccaacttacaagggatgtgaaggacctcttcaaggaaaactacaaaccactgctcaaggaaataagtgaggacacaaacaaatggaagaatattgcatgctcatcgataggaagactcaatatcatgaaaatggccatattgcccaaagtaaattatagactcaatgctatccccatcaagctaccactgactttcctcacagaattggaaaaaactactttaaatttcatatggaaccaaaaaagagccagtatagccaaggaaatcataagcaaaaagaacaaagctggaggcgtcacactacctgacttcaaactatactgcaaggctacagtaaccaaaacagcatggtaccggtaccaaaacatatctagaccaatggaacagaacagaggcctcagaaataatggaacagaacagaagcctcagaaataacaccacacatcttcaaccatctgctctttgacaaacctgacagaaacaagcaatggggaaaggattccctatttaataaatggtgctgggaaaactagctagccatatgtagaaagctgaaactgcatgcgttccttacaccttatactaaaattaactcaagatggattaaagccttaaatgtaagacctaaaaccataaaaaccctagaagaaaacctagacagtaccattcaggacataggcatgggcaaagacttcatgataaaaacaccaaaagtaatggcaacaaaagccaaaatagactaatgggatctacctaaactaaagagcttctgcacagcaaaagaaactatcatcagagtgaaaaggcaacctacagaataggagaaaattcttgcaatctatccatctgacaaaggtctaatattcagaatctacaaagaacttaaataaatttacaagaaaaaaaataaccccatcaaaaagtgggtaaaaagtatgaacagaaacttctcaaaagaagacatttacacagccaacagacatatgaataaatgctcatcatcactggtcatcagagaaatgcaaagcaaaaccacaatgagataccatctcacaacacttagaatggcaacattaaaaagtcaggaaacaatagaagctggagaggatgtggagaaataggaaggcttttagactgttggtgggagtgtaaattagttcaaccattgtggaagacactgtggccattcctcaaggatctagaaccagaaataccaattgatccagcaaccccattactggatatctacccaaaggatcataaatcattctactataaagacacatacacacatatgtttattgcagcactgttcacaatagcaaaaacttggaaccaacccaaatgcccatcaatgatagactggataaagraaatgtggcacatgtataccatggaatactatgcagccataaaaaaggatgagttcgtgtcctttgcagggacatggatgaagctggaaatcatcactttcagcaaaatatcacaaggacagaaaaccaaacrctgcatcttctcactcataagtggaagtggaacaaggagaacacatggaaacagagaggggatcatcacacaccagggtctgttgggggctggggggctgggagagggatagcattaggagaaatacctaatgtaaatgacgagttgatggatccagcaaaccaacctgatacatgtatacctatgtaaaaaacctgcacgttgtgcacatgtgccctagaactcaaagtataataataaaaaaagaaattctagatagagcaatatctcacaaaattaataatccattccatttaaatagactatatcagtcagcctctggcacctacaaatccattcactgttttcttttctgggttcttttttaagtaaataattggcttacatttaaaatttaaatatttcctattgccatctggatttctagmttctgtttaaataccccaagggctggcagtgctgagccagcattctcaatgacaaacatgagtggaactgggtgtgcctcagatctgcaagttgcagttctgcaagttggccactgcgacctaaagtgtgttaccattttatcactgagcttaagccaccaccaaagtttaagccattctatatactatgcataagggagtagagcagcaggtaaattcactttacggggaaaaattcatcaaaactgcttaaatctgtgaaaataaataaaatttaaaagctgtgggaacccccaaaatcactttaagccttgagacgtgactgtgatctgagtcgtatgtggttataacttctgttctcaaattatagatgaactagctttcttatttttcttcttctgtacaatgactagagagaattaaatgacatcatggaaaaaaacctctggccttcttaattaatgacccttgttgtatattaatttcccattgttgtcctgctttgcttagaccagatgacaaaaacccacaattattgcaccctctaaaaaacatgttaattgtatccttcccaaaaataaacactgcgtataactgatcaaatggctgtaactatgtgccaaccttgtacaaataatgttataattttgctaaacactcctctctctctggatataaaattgaaaccttaacttctccacttcagaatgctgactgcattcctttggatttgatgtttccagatggtccatcctcacactttgcacttcaataaacactccttaaattcaattctcacccttttattattttaggttgacaaatcttttttaaggtaatttgaccatcatagccatcaatttaaaactttggcccagcgtacaaatgtatttgtaccaaacacacaaaaatacatattcatccaatgttgttcaccatagcattgtttgaaatagcaaaacactggaagctacttaaatatccatcagtaggagactagctaaataaattatggaatagccacacaatagaatactgtacagctattttataaaagaagagagagaataaagtaggtctattatgtaccactcattagccaagaatgtattttaaaaaataaaaagggtggctgacaagatgaccaaataggaacagctccagtctgcagctcccagcgagatcaacgcagaaggcaggtgatttctgcatttccaactgaggtacctggctcaactcactgggactggtgagacagtgggtgcagcccatgaagagccagctgaatcagggtggccatcacctcactcaggaagcacaaggggtcagaggaccccctcccctagccaagggaagctgtgaaggactgcgccatgaggaatggttatgaagccaaactaagcttcacaagtgaaggagaaataaaatcctttacagacaagcaaatgctgagagattttgtcaccaccaggcctgatgtacaagagctcctgaaggaagcactaaacatggaaaggatcaaccagtaccagccactgcaaaaccataccaaattgtcaagactattgacactatgaagaaactgcgtcaactaatgggcaaaataatcagctagcatcataatgacaggatcaaattcacacataacaatattaaccttaaatgtaaacaggctaagtgccccaagtaaaagacacagactggcaaattggataaagagtcaagacccatcattgtgctgtattcaagagacccgtctcatgtgccaagacacacataggctcaaaataaagggatggaggaatatttaccaagcaaatgcaaagcaaaaaaaagcaggggttgcaatcctggtctccgataaaacagactttaaaccaacaaagatcaaaagagacaaagtaggccatcacataatggtaaagggatcaattcaacaagaagagctaactatcctaaatatatatgtacccaatacaggagcacccagattcataaagcaagtgcttagagacctacaaagagacttagactcccacacaatagcaatgggagacgttaacaccccaacaccccactgtcagtattagacagatcaatgagacagaaaattaacaaggatatccaggacttgaactcagctctagactaggcagacctaatagacatctacagaactctccaccccaagtcaacagaatatacattcttctcagcaccacatcgcacttattctaaaattgatcacataattggaagtaaaaccctcctcagcaaatgcaaaagaatggaaatcataacaaacagtctctcgggctgcggtgcaatcagattagaactcagattaagaaactcactcaaaaccacacaactacatggaaactgaacaacctgctcctgaatgactattgggtatataatgaaattatagtagaaataaataacttctttgaaaccagggagaacaaagacactatgtaccagaatccctgggacacagccaaagcagtgtttagagtgaaatttatagcactaaatgcccacaggagaaagcaggaaagatataaaaccaacaccctaacatcacaattaaaagaactagaaaagcaagagcaaacatattcaaaagccaggagaagacaagaaataactaagatcagagcagaactgaaggagacagagacaggaaagaaccttcaaaaaaaccagtgaatccaggagctggttttttgataagatcaacaaaatagatagactgctagctagaccaataaagaagaaaagagagaagaatcaaataggtgcaataaaaaatgatggaggggatatcaccactgatcccacagaaatacaagctaccatcagagaatactataaactactctatgcaaataaactagaaaatctggaagaaatagataaattcctggacgaatacaccctcccaagactaaatcaggaagaattcaaatccctaaatagaccaataacaagttctgaaattgaagcagtaatgcatggcctatcaaacaaaaaaaagctcaggaccagacggattcacagctgaattctaccagaggtacaaagaggagctggtaccattccttctgaaattattccaaacaccagaaaaacaggaactcctccctaactcattttatgaggccagcatcatcctgataccaaaagctggcagagacacaacaaaagaaagaaaatttcaggccagtatccctgatgaacatcattgagaacatcctcaataaaatactggcaaactgaatccagcaacacatcaaaaagcttatccaccatgatcaagttagctttattcctgggatacaaggctggttcaacataagcaaatcaataaacatagtccatcacataaacagaaccaatgacaaaaaccacatgattatctcaatagatgcagaaaagacctttgacaaaattcaacagcctttcatgctaaaaactctcaataaactaggtattgatagaacgtatctcaaaatagtaagagttatttatgacagacccacagccaacatcatactgagtgggcaaaagctggatgcattccctttgaaaatcggcacaagacaaggatgcattctctcaccactcctattcaacatactattggaagttttctagccagggcactcaggcaagaggaagaaataaagggtattcaattaggaaaagaggaagtcaaattgtctctgtttgcagatgacatgattgtatatttagaaaacgccatcatctcagctcaaaatctccttaagctgataagcaacttcagcaaagtctcaggatacaaaatcaatgtgcaaaaatcagaagcattcctatatgccaataatagacagagagccaaatcatgagtgaactcccattcgcgactgctacaaagagaataaaatacctaggaatccaatttacaagggatgtgaaggacctcttcaaggagaactacaaaccactgctcaaggaaataagtgaggacacaaacaaatggaaaaacagtccatgctcatggataggaagaatcaatatcgtgaaaatggccatactgcccaaggtaatttatagattcagtgctatccccatcaagctactaatgactttcttcacaaaattggaaaaaactactttaaatttcatatggaaccaaaaaaagagcccatatagctgaagggggccagcccctccacacctgtgggtatttcttgtcaggcaggatgagagactgaggaaagaaataagacacagagacaaagtatagagaaagaaaagtgggcccaggggactggcactcagcatacagaggacccacactggcaccagtctctgagttccctcagcatttattaattactatttttactatctcagcaagaggaatgcagcagaagagcagggtgatagtggggagaaagtcagcaagaaaacatgtggcaaaggaatctgtgtcacaaataagttcaagggaaggtactatgcctggatgtgcatgtaggccagatttatgcttctctccacccaaacatctcagtggagtaaagaataacaaggcagcattgctgcaaacwtgtctcacctcctgccacagggyggttgttctcctaactcagaattgaacaaatgtacaatcgtgttttataccaagacactcagttcccaggggcaggcaggagacagtggccttcctctatctcaactgcaagaggccttcctcttttattaatcctcctcagcacagacccttcatgggtgtcgggctgggggacggtcagggctctcccatcccacgtggccatatttcagactatcacatggggagaaaccttggacagtamccagcgttscagggcagaggtccctgcggctttccgcagtgcattgtgcccctgatttattgagactgragaatggtgatgacttttaccaagcatactgcctgtaaacattttgttaacaaggcacatcctgcacagccctagatcccttaaaccttggttccataaaacacatgtttctgtgagctcaaggtcggggctaaagttacagattaacagcatctcagggcaaagcaattgttcagggtacaggtcaaaatggagtttcttatgtcttccttttctacatagacacagtaacagtctgatctctctttcttttccctacatatagccaagacaatccaaagcaaaaagaacacagctggaggcatcacgctacctgacttcaaactactgcaaggctacagtaaccaagacagcatggtaatagtaccaaacagatatctagaccaatggaatggaacagaggctgcataaataacaccacacacctacaaccatcagatttttgacaaacctgacaaaaacaagcaatggggaaaggattccctattttataaatgatgttgggaaagctggctagccgtaggcagaaaactgaaactggaccccttccttacaccttatacaaaaaaactgaaactggaccccttccttacaccttatacaaaaattaactcaattttattatgttgtattaaattaagttgggtttaattaagatggattaaagacttaattataagacctaaaaccataaaaaccctagaagaaaacctaggccataccattcaggacacgggtatgggcaaagacttcataactaaaacaccaaaagcaatggcaaygaagtccaaatagacaaattggacctgattaaactaaagagcttcagcacagcagaagagactatcgtcagagtgaacaggcaacccacagaatggaagaaaattcttgcaatctatccatctgacaaggggctaatatccaaaatctacaaagaacttaaacaaatttacaagraaaaacacaaacaaccccatcaaaaagtgggctaaggatgtgaacagacacttctcaaaagaaaacatttatgcagccaacaaacatgaaaaaaagytcatcatcactgctcattagagacatgcaaatcaaaaccacaatgagataccatcccacaccagttagaatggcaatcattaaaatgtcaggaaacaacagatgctggagaggatgtggagaaataggaacacttttacactgttggtggtagtgtaaattagttcaaccgttgtggaagacagtgtgrccattcctcaaagacctataacctgaaacaccatttgacccagcaatcccattactgggtatatatccaaaggattataaatcattctactataaagacacatgcacacatatgcttattgcagcactgttcacagtagcaaagacttggaaccaacccaaatgcccatcaatgatagactgcataaagaaaatggggcacatatacaccatggaatactatgcagccataaaaaaagatgagttcatgtcctttgcagggacatggatgaagctggaaaccatcattctcagcaaactaacacaaaaacagaaaaccaaacaccacatgttctcactcataagtgggagtggaacaatgagaacacatggacacagggaggggaacatcacacaccagggcctgttgggtttatagggggctggggaagggatagcattaggagaaatacttaatatagatgacrtgttgatgggtgcrgtaaaccaccatggcacgtttatacctatataacaaacctgcaagttctgcacatgtatctcagaacttaaagtataataatttaaaaaaakaaaaaatgtaaaaaaaagaaattaaaaagagttggagcatagaagaaagaaaagaaatgcaatttgaagggcagtatgtgcagtgtaatctcatttgtggaaacaatttttamaagaaaaatgcatgtaaatgtataggaaacttctggaaagatacacaaagccaagagctgtatgggaagaaggtaaaagaaccatagggaasagttaccttttacttttcacataactttctttccctttttaaaataataagcatgttttatttttataatttaatgaacagatgtgttgatttgaaaaacacactgatcctgaaagttaaaattccaattcagagaaaattgatttctatgaaaagtatcaatcccccaacaatgtcatcaaaatgaagtgtagctatacaacacagacagtggttgaggttgtcatcactcactcgactttcacatatagaatttaaaacacccgaccgggcgcagtggctcatgcctgtaatcccagcacttttggaggccaaggcaggaagatcactaggtcaagagatggaaaccatcctggccaacatggtgaaaccccatctctactaaaaatacaaaaattagctgagcgaggtgttgtgctagctcaccaggtactgtagtcccagctactcgggaggctgaggcaggagaatcgcttgaacccgggaggcagaggttgcagtgagccaagattgtgccactgcactccagcctgatgacagagcaagatgccatctcaaaaaaaaaaaaaaaaaaaagaatttaaaatgccacagtccttggtggactgaacaaaagaagattaacatggtaataaagacaaatgagtacatatggaagaaggggtcagggggctcatttcttctagggaacaagggccctgagcttctataccccttcgtatttactgagtaaaggagatagggagaaaggggtggttgtcagtaagctgcttgacttagtgtaggcttgtatgactgcattctttgaacagtagtctccagaggttccagtagataacctcaaggagcacagcaccagggagtaattgccctcagcaaacctcctggtggcaggtgcagaagcgagtttgcccacattttgcaatcatgataaacagttggctgtttgatcatatagccttcagtggaatgctgagttggtcacgaccctcaggcctttggctccctacattaaaacacccatttcaccagattaaaaatattcaataaaatttctaaaaagcacttaacacttgccagcacttactaaggaagtgctcaataaatgctgttaacactcttactattatttctctgcttggcagttgtcctaatcccacaccagcccttccacatagcctaatcctgacttgtgtcagtgatgcatgactcaacagtgaatctgggacagctattgcaaaatgcaagacttaaaatccatcccagatgaattctcttctggaccgcaggcagcccttgaaaaggatgagagtagagccctcaatcatggaggcatttgtccctcaagataggcagatgttaccacctccatacaagaacaatcccattgcctattacagttcccatttcagagagatactcccacatatgtatgtatttccctgaaaggtttcttgttcctcttctttttttatttttttgagatggagtcgctccttctgttgcccaggctggagtgcagtggcatgatctcagctcactgcaacctctgcctcccaggttcaagcaattctcctgcctcagcctcctgagtagctgggattacaggcacatgccaccaggcatgtatttttagtagagacagggtttcaccatgttggtcaggctggtcttgaactcttgaccatgcccagctaatttttgtatttttagtaaagacaggatttcaccatgttagccaggcttgtctcaaactccagaccacacccggctcatttttttattttcagtagagacgaggtttcatcatctcagccagctggtctcaaactcctgacctcaagtgatctgcccacctcagcctcctaaagtgctgggattacaggcatgagccaccatgcccaccccaagatttcctgttcttatctccaataagccagcttgatgaggagtagcgctagagattcccatacttcttgacttccttctatccttttctgctcacaggccccctgtgagaacactgcatgttctcactcataggtgggaattgaacaatgagaacacttggacacagggtggggaacatcacacactggggcctgtcgtggggtgcaggcatggggaagggatagcattaggaggaataccgaatgtaaatgatgagttaacgggtgcagcacaccaacatggcacatgtgtacatatgtaaaaaacctgcacgttgtacacgtgcaccctagaacttaaagtataataaaaaaaaaaaaagaaagaaagaaagaaaaagaaatagtgctggaggccaaatagcaaccctgcccacacaaggaagggccatgtgttgttcaccaagctcccaagccacaattctcttttcccagaatcctttgctctttgaagtgtggtcttcctcactttcctggaaccctcagcccctcagtgggcccgtctacctctgaagagaagaggaagagagatcaaatacccccctggaggcttgtccctttgaaccaagccctgagaacccccgcagcagtcctcctgtgtaccctccccccagccccacacagatggagagccctgggaagggttcccacagtgcatgagctccaaacagtgcaagagcacaaggagtgtggcgcttccagcctctgtcaataattcatgaggctcagactgaggagcaccagtcagagtcagctttgcctggacatggggaaaattatactgcagctctcctgtctcatcgggatgtgctgagtagcaaagcagagtgctgcagctgtaacttcttggctgaggaaaacactagaaatccagtgcaggcctgttctattacttgctcgccatacacccccttttgaatgttgaaatccttgttttttttctttttgttgagacagagtctccatctgtcgctcaggttggagtgcagtggcgtgatcttggctcactgcaagctccgcatcccgtgttcatgccattcccctgcctcagcctcccgagtagctgggactacaggcaagtaccaccacgcccggctaattttttgtatttttagtagggacgagtttcaccgtgttagccaggatggacttgatctcctgaccccgtgatccgcccgcctcggcctcccaaagtgctgggattacagggtgagccaccacgcccagctgaatgtccaaatcctttttcagctgctcagctgacctgcacatatactaaatgaatcttgagcaaacatgaattctattcaaaagtcatgcctagaactggatttcacaaaccaggattctttcccctctaattgtagggactggcataaggctgccaaactggtgatttcaccaataacacatctctaaacctacccatctgctttcatcatcttttctgaaacaaaacactaacacacacacacacaaaaagaaggaaaggtatactccacaataaaggactgttaaataagcttagctttatgaaactcactgtaattgtttccttttctcattttgctttgaactagtgaaaacgctgccatgaaccagcactgcttctcagtctggctttggaggccagtgggttaaactaattcagatacttacctttgggtctgttgcggcctttctacactgtaccataagccatccatatttattcattctcccggaaacccaggagggagatcatttcagcccacttggcagaagtggagactgaagtcttggacacagaatttatagctggcaaggactttattcatcatccataccctcagtaatttacagatgaagagtctggcccagggcaccaataataatcactacatggtggcagtaactactatgtgcttagtagcttacagttcataaagagattttgcattcaacaaatatttattgaactaggatggaggctaagacctggggacagagtggttagggagaacttgagtgccccgagttctttgcatttccaccactgcttgagggactgtccagcctcctcgctaccacttagcccctgtaaaggaggaagtccctttggcgagggatatgagatcctgttttgccaatgaccgtagtctgccctccaaggggcccgtgaagatggaagagaccttgggcagagtgaagggcagtgccaggcctggcgcagctactgcctatcacgtctctctcccaggctgctccagcctcacctggtggactccatggggaccacaggcctcacctccatgggcagtctcaaaacatttgccctcctgtgggctgtcacatacatagacccagactttcttggagaaggaattctgaagaagcaaaagcaaccaactcaaaacccccacttccccaagaagaaaacgtggacaagcagatgcagaagggcagcagccaaagtctgcgggttcctgcgggggccaggggaggggcgagccctacaggcaacttgaacggagagcgctttgatcactcaccagcccgggaaggcaagccccagtcaggcggaaggtagctggctgcggggcggggcgactggcgggcggcgggaggcgccaaccgccacagacgactcccagctggccgagggcgggaagggggcaggcagggaagcggcccgcccttcgtcctgccccttcgccctactctgtcacctccgctggaaggagtggaacccagacttgctggtctgatccatgcagatggccaggctgctaggcctctgtgcctgggcacggaagtcggtgcggatggccagctccaggatgacccgccgggacccgctcacaaataaggtggccctggtaacggcctccaccgacgggtgagtgttggtgccggagtttctgaggccctggctgcctggaaacatgcactggtgtctcgtcctttgcctccagtgcccctgtcctcagacctcacataccgccaaagtctggccatggaaaaaaagtagccacgtggtccgcctgaagcccctccgaataccctggccctcccttgccagcccttctgtccctgctgcctctggcacaactgtgccacctctgtgcagccccatcgatctagtccccccagtgttctgggctgccccagtcaaccagccttacctagcctctgggaagaccagaaactggaaatgcaagggaatctggattcaaaatcttataacaaggcctccagctttttgaaaatgtaccattctatttgggctccagaaagtctcccggaacccctcccccttacctagatgggacaccagagccatgtgtcgagacttttttttaggtcggtacatctgggcctaccttgcccagcctgtttctcacccacctctcttgtcagtcctggttctcatttctacaggactttgctagatgccagctcttcacaaaactaaaatacaaatgtagataaaatgctaatggctgacaactgcagaatgtgtaactcttcttcccaaggcaatatttacgtttttgaccagagaccatcttttcacatgcaccccaaaaaataattatggaaagaattttgagaatgatgtagactagtaagaaagaaacctggcggcaggactgttctgagtgagaccttcaaatcacggaagtggctgctgctgcacacccagctcatttctcacctctcagtcccaacaggagatgaagcctgtcacccgtggtgggaactgtagaaagtgatgtcagttcttgggaactaaggctgtgatccaggtcataataaaaataagtaaagcagtgctaaaaatggccatgccattaagcctgttttacacatagtaggcacacgtaggagttatatagagaaagagccagaattcaaacccgggcagtcttaacttcagagcccatgctgtcgacctcttcccctgcacaggccttagcagtctttgtctctttctgctcacaggatcggcttcgccatcgcccggcgtttggcccaggacagggcccacgtggtcgtcagcagccggaagcagcagaatgtggaccaggcggtggccacgctgcagggggaggggctgagcgtgacgggcactgtgtgcca

SEQ ID NO: 97390 - DNA, 17522 bp, Homo sapiens
tttggcaacggtatgttgactagacacacaatattgataaaaaaaaatttttaaatgtagtaactggacagtacatgtgataatataatctgcccaactggctttactgatttggaagctgaaactcaaaaggttaaaggacttgtccatggacacagatattttggagcacagccatgactaaacaatccttgtctcctactgcactgttcccttcaacaggtcatatacctcagcccctcatgtaaaaagatacaatatgtacacaaaatacataaaaagatacaagccaaataaaaagcaatttgatgactattatttctcaaatataattgaggtagttaacttcaaacattatcagtcttaatacacctttcccataatataattacttcaccgatctaaaaatgttttatgatatcaaattaaaatgtcttaggcaactgccatgtgcaggaagttcattatagtttcaataatgtggtactgctgtaaacttccaggttaaaagtaatcatccttacatgactgaaagtttaatcagatacatataagttacacataacaagaacaaaactataacactaggaaatgttactttgtgcttcaaattatttattggtaaagaaagcattaagtcagtaaaagcagcatctaagaatagagaatctccttattttcaattttctcatttgtaaaataaggagttacagaaatacaatctttggaaaaggcccaatatgtagcaagataaaagtataaaagtaaagtgtttcaaagagagttggggaccaagctatgctaaattcccaagtgctctggaaccctaagtctcagcagagtagtgtttcaacaaatccctccacttttcggagcgcaacacatgtaaagtggttgtgtttaaaaccccaacgtgcaagtttgaaaagactgttttacaaaacaattgttaaaatgtctaatttctctcaataatgtcaaaatcatttcctttgagaaaatgatacctatctctcatactcttccaaccacttcttaaaacacattcagctcattattccaatgagcaggaaacttgcggggaggtggggctagcacacagatcccatggcttggacaactgaagcatgacttttgtggatttgtaccatgtggtgtttcaggagagaagaaaaatacctcaggtgatgaaattttcaaaacgtatctaaaactgcagttggtagaaggctctccacagccagctgtctttcaagaaaaggctccaagtttatttaaaatctacaagcagaacagaaccatacctcaaccaagctctaacatcaagaagttttacccgatttacgtagttaaaaggataagaaatcggaatttacttcaatggatttgttcgatgccttaataatgaatgaactagaggcatcactcactgacttgagttctgaaggagtctctcagccctgccccctgtaaaaccttaagcaatttctacagaattaggtttttcgaggctaagcccggttcaaaggaagtctccccgcctccctcccaggggctgaagcccaggacagccggggcggcgcgcccgagcgggtgggggcgcggggacgccccctccccgctcgggaaaagttctgcaggccgctctccggccaggccggcctgcggccgtcgcctgcttcgccgccacaaacacccatctcggccgcggacggccagagggtcgcgccccctccccgcgccaccgcaactaacaccccgcccccgcctccccgccaccgccctcgccgagcgttaacccctcgccgtccgccgcccggctcgggggaggaggccggccagggggtggagttgtcgcgtctcctcccgggagcgcccgggcagacgcccggcttgtttacaggccccaggcctgcccgccgccgccgccgcgcaggcccgcaccgcccgccagcccgccgtcggcccgagcgccgcacttacccggagcagccgcaggcgggcaggtccctggtcggccgaggcggcggcggcggcagccggggagggggtcaccgcggcggcgacggcggcagccgggggaggggtcaccgctgcagcggcgggccaggtcaggctggggaaggggcggaggaggggaggagccgggctgcgtccgggcccccggctgtcggcgccctcgcggctcagatcatccgggcgttggagagggaggcagagagcgggtcccggagaaggaggaggaagagccgaggactcatcgctttcgcgcctcagctgtctagagtccccccacccccccctccccaaccacccgttccggagcaacagccgcctgaggacccgaagctgcgggccggacgagcgccgagaccactgctctctagctcccgcgcgcgctcccgtccctagcgccgccaccgccgccgccgccgcctctagcgcggccccgcgcaggcgcgctcacgaccgcgtcgcccctcccccacccctccgctcgccccgccccgctggctccgccgccgctacagctgcggcgcggcgcgcagctacagagacccggatgtcgttgggcaggaactgcggtgagggctggcgggcgggggaggggccgccacagatgacgtcactgccttacccagcttctttctctgccgctgctgctgccgccgcctttgccttacggcctggagcaccaggccgaagccgaagggagcgtccggatcccggatagcagccaggacccgggccttcacgttccggcgccagggactggacagaatgtgcggctattaggtgcccagtagatcgacagcccctccgtgccggcccttggccaagtagggactcggaagctacccctacggcgtccgcgcccggagccctggctcttctacctgcctgcagatacaaaccccactccctgcgaagatggtgtacacgcagccccgagcacagacccgaagctgtccacccttcttgggcgccgtcgcggtctggccgctgcccttcgaacccatggtgggtcccaggcagctgccagacccccctaccccagagtcccactcctccagagccttcctctcccagtgaccccaggaagcccaagcaggtgccacggccacacacctcgcgacccaaagggcagagacacaagcacgctaccaccgcccaccaatgtgcgagtgcaactgattcacgcacggggcacatgctctgagtttctggcaggttttccctctatagttcaggggattccacattgtatttatttgcacatgttagataatcacgtggttctgtcccaggggacctccaacgacctccaatgaggtaggttaagggaacaggatttttcaaaatcaggagaataatcagaaacataacagctgcttctattaagaggtagagatgagctaaagttaatagaaactgcacgtgccagcggccaaaatccagtttagctagctggaaaacccgacccacgctgcttgcagacgccggggatagaatgacaaaccctaggcagccaatgaatcgcagcctaggagcagtacatcaccagcacgggttcccattggctggggtgcccttccctctcttgtcagcggcttaaccagttcacgaatttgacctacaccacattcgcaggaaaagaagttagaagaaaagtccgtatttttaaaagatgttctgatgcacacacaaaccaaagacttcattgtagaaggcaggttcttttactggccaaattgagttctggccagtaaaaaaggtaaatttatgttgaaggcctctctattttacttgaggagctcactatagcaatttgcaccctactactttctatctcctaaaccattttgttgccccaactcttagatcaaaagcaacctatttattctttctggcattcagcaaatatttagctgctgcttttaaagttgtaaaaagccatctctaattttctcaacatgactttggggaaggttctgtttccttcacttttttttttttttttttttttttttttgagacagagtctcgctctttcatccaggctagtacagtggcacaatctcggctcactgcaagctccgcctcccgggttcatgccattctcctgcctcagcctcccgagtagctgggactacaggcgcctgccaccacgcctggctaatttttttgtatttttagttcagacagggtttcaccgtgttggccaggatggtctcggtttcctgacctcgtgatccaccctcctcggcctcccaaagtgctgggattacagtcgtgagccactgttcccggccagaattccttagaagatgatcgtggatcatttccacatatacaaaataaaaataaaattcactatgcatttggtctcagtatcatctgaggatacatttcctaattctccacatatctccccgaccccccaaaaaaagaaattagatcagagatctttgaaacgctaccttcttggaatccttaatactccaggcaagtaacagcatgagtagcatgctggtggactcattaacattctgaactacaaaagctcatatggcaaccatttagagtgctcttaaaagacaaattttcttatttataagcagaagctgggtcactagtgacggtagtggaccatagaaaacttgaaatgcctgcctatctttctgcttccttcctttaggcttccacacctttcttctctctgttctgcacttggagaatctgggtcaattgtagaagaagagggagagaaatagaaaatatgaacagaaagaaatttttaaggagtctacgcattgtacagactgccgataaagcagcaccttcctactatttatttctgaatacagcttgcagggacattttggtatgaactaggaaactcatgggttataagattaatattttaaaaagatatcaatattgtctgattaaatatgtttaatatcatcatatccccttttattaaaccttatgctaagaaggggggacagatagaaggggaaaataacattgaaaaaagaggattgaaagttctcttctgaactgtaagactttgccgggcctctacacatatttgggatgttcacagtaagattttagtgggaatatattgccatgatgatgacattttagtaatttttataggtatattataaaactatcctgctctgctttggaaatctgtttatatttcaattaacaaagaaaaagattatctacaagattggctttaaagtcctgaatttagtgtgtgttgatagcctagtaattgggaggcttggggtgaggacaggggctgtagtgtggagtctaaagcttaatctgatcagcaatactctctttccctttccaccacaattgtgacttaaaaaaaggtttacattcctgctcccaaattactctccaggagagtcacccttgaggcagacttgcctgggcctctcaaaatatatgcagtaatgtaaatgaccccctcaggaggctagtatttgagaatacccctcaccatccttttccactgaagccagtcactactcaagagttagaaagccaaccagaacataggttcaacaattccttcctccctcactacctgtttcatatttttttctctcacacatcctcttcatttggtttcctcttttctcatttctccttctctctcctccctttttcttctcttctctttttgccttctttgcccttctcttccccattcttcttttctctcttttcattagcttagtacaaattgtagcttctgctacccattttctcccagaacagaacatgcgagcagacagtgcccctaaatgaatttcattcagggagagggtgtgccgcctaccctggccctccttcctccctcccctacatcataatacattatgagaaacttagctgcttagaggactgttacagaatcaaaaggattagagaatcctgtcctgtgtgacatcactgggcagccccattagggaggggcagaggggagcagccagcagtcttatgctaccactgtggctcatcctgcgacctgagagaaacctgggcaactgtgagcaccagaggccaagtcctggacagtctttagggtaggctttcacctcaagatagccatatatggccacagccttacaatactagagtggatcttgtcagataagttcatctgttcatgagatagctattgtgcaccaagcactgtgtgggacactggaggtagataatgacatcaatgggcaagccctgcccacaaagagccaacataataataagaggcatagacaaataagtcagcagatagaaaggaaattgcatactgtkatccatgctgtgaagaaaataaataaggaaacagatccgggagacgacttgaaacaggtgttcagtgcagacctctctaagaaggcagcatttgatctaaaggatgagaaggagtcagcttcataatcaggggagaactttccaggtagaggggtcagcatgggcaaagggcctgatgtggaaaagagcttggcagaaaagagtttcttacagcccaaagacaagttcagcaaactcaaggcaaatagtttatggtcatttaagtttcgagagtgtttcaacgtggacattagggatatttaatttataatcaggaaactacattatgtgcacgggtataatccatagaaaataacttggtgagttggtctggtgcaaaaagcaaagcaacttttttaaaaattgaaattaaaaatagtctgggtgcagtggctcacacctgtaatcccagcactttggaaggccaaagcgagtggatcacttgaggccaggagttcaagaccagcctggccaacatggggaaaccccgtckctactgaaaatacaaaattagccacacctggtggcacacgcctgtaatcccagctacttgggaagctgaggcaggagaatcgcaggcaggagaatcactggaactcaggaggtggaggttgcagtgggccgagatcatgcccctgcaccctagcctgcatgacagaaaaaaaaacacctttattcaactattgaaattgagaagtattccataactccaggaaagacccgtcagacaatccagcagcagctagaaaagagtgaattataagcttcaaataaatagttttcatcccaatataggtacctatttgtgctaagtaaagactagcacagatttgagtgggcttcttcagaacaattcttctgggtgtttactgtctatcctgggcattacagaagatctcaaactaaaccatacttttgaaagcagcgacacactgcatccttaacaatggtggcctggttgaaaacagtaatgaaattgtcatcatcataaagccttttatctgaacctgactctgcagtttacaaagcactatcatacagactaaccagtttaatcctctcaaaaacccttgcaggtagacagggcaaggactcttaatctcctcctttatagaagagaaaactaagcatctggtagtaactacccagggtcacagaaattaatgacgggtacccaggtttgtcccccgtacgatactgagcatcattgcttttacatgctggtagtaaaggcagcaggagtggaaagagtgctgaacttagttccagtccgtggtgtggagagctggcctatactggctcatgacagcagattattaaattttcagaaattttgcctgctgtttgttaaatactcattattaaaaattaaatgatataggctgggtgcagtgtctcatgcctatattcccagcactttgggaggctgaggtgggtggatcacctgagatcaggagtttgagatcagcctggccaacatggtgaaaccccgtctctactaaaaatacaaaaattagccaggtgtggtgtcgggagcctgtaatcctagctacttgggaggctgaggcaggagaattgcttgaacccaggaggcagaggttgcagtgagctgagattgcgccattgcactccagcctgggtgacaaggtgagactccatctcaaaaatcaatcaataaataaatataaaaatagaaataaaaattaagttagataaacttccaatgaaataaattttaaacaaaggtagtatgtgataaaaacatcacttccaaattatgttaatacattttaatattgtctttgttctttaggcaatttacatgcattgtgtctgcatggtggaaattccctatatgtaattgtacatctcttcccaataccacatttagtgagttttctttggtagcttgatcagcggacaccacagatgagggcttcacttattgctttgctggttgtgggctagaccagggttgtccaatcttttgcttccctcggccacattggcagaagaaaaatagtcttgggccacacataaaatacgctaacactaatgatagctgatgagctaatacaaaacaaaacgaaacaaaatcacacacacacacaaaatctcacattttaagaaagtttacgaatttgtgttgggctgcattcaaagccatcctgggctgtatgcggcccacaggcccagggttggacaagcttggtctaggcttaagtgacagagaaaatgttttatgcagattaaatgtaaaagacatgtcgtgtctataactgttacatggtgaatagcataaaaacattcaatttagcaatgaagtcacatcattgactaataagctctaacatacatttttgttgttttatttttatcttaaatgaaaatattaaccaatagccatgttggaactacatttggaaaggtggttgttaaacatttcccagcacacacctggatctgcatctgctgtgtcaattgaaccactcactggttctgtgacctcaggcaagtcatttaaattataagccttggttttatcctccacagaatacttcctcctaaaatgtgttgtgaaaattagaatagatgaaggcacccttgaaaagatgactgatgcggttggttgccccaccacttcctactacttggcagagcctcctcgttggcagatccttctctcactagagcatgtatatggatgcatgctctctcaccctcccttgtagcttagagcagagcataccaatctatgtgccagcataccctggtatgtctcagatgggtcatagatgtgataaggtatggatcccttaagcccttgggacattcaagtgaggctgagctgctgaagccctgggatggtatgactggccacaagcaacattacccaggtacccctctgtgtcacaaaaacgttatctttgtatttgtgtcatggtgtgaaaaaattgagaagcactgcctggggacatagtgaggtagcccaattctggataaaggaaattgagaagtcttgagggggtagagaggttttcttccctaataagaagaatcacaggagagaaaatgccttcctcagccatatgttgttatttctatatgtgagcctggaatttcaaggttatcttgcaaagaaccaaggcaatgtagagaaaagaattgatagcaagtggctggatctttcacattgtaaagccattgagccatccgtgcaattgcccaccttgggaatttatttttaagagtgataataaatgctcctcattgtttaaactactttgatttttgtatttggttattcataattaaaaacacccaaatacagtagaagaactggtacatccctgacacctaatgagtgctcaatatggttagttaatcaccaaattagatcctttgcctttagaaaagctgccatggtcaaatgtgtgttgatcttatwtttcgtaaatatttaagaaatttgttcagtaactagcttaacttttaatatttatcttgagtctcttctaaatatgtttttactgtataataaaagcaataattgaaaaatgacatcattttaagcttgagagcaactagatacaaagatgttgatatgcattttctcttcttgaaggatctagacaaactggagcaccattacatgaaaaaggttaaagaatcaatgttttgcaaaatagaactggaattaattcatgggaattacagagaagatcatattagttcaatataaaaagagggcctagaatgtgccaagctccatacaatgcccctcatgagtgttatttaattctcacaacaactttgcaaaaaagaaactatttttttttccattttacaaaggaggaagctaaggctgtgaaaaagagctcttttgcaagcctaggacctgattccaaaattcccactctttctgttgcaaattctggctaagctttccagagatgacttgctttccccttgaggccctttcagtgcattgtgccatggaaaacaaaaagcccaacaatgacatctttaccaaagatgccttggggagatgggagaagagttacaatgcacattacacagcaaaatcttttttaagctccaagtaaaattggttttttcttagagttttgcttccagcagtcacttcctccattctcctgctctctccacgtgaggaaaacttctatcctgccttctcctaatacactttcctgttttttttttcctgcacatttcttaaaaatcccacataaggcaaaakccaagacaatatccatcaacacctccacccccaccgcatgtccatggagagcttcaastcatcctgccgctggtacaaacacggcagaggcctctttgtaaagaagtggtaggtagaattcaggttagcaccagaatctgaaaactccagctcctttgactgggrccaggctggtaatataaatkttagatcaggctgggtctgacacaatggggatcagtagagcatacttgtcacatttgaaggcattcagaaaaataataaccttaaaacattctaaacatgttgcaatcaaagagrataccccttgaccactgcaygaattggagttcaaagatcatctctcttttgcctaggctgtagactagttatttaacctctctcagacttggtttcctcttctggaacagggtatatcaactaccttgcagaaataaatgacatcctgtacacaatgcacctaccacgttgcctgacccaataatgtgtacatacataagaaaatgttcatgccctttgctcactttaaaatttttttttcttgtatatttgtttaagttcttcgtagactctggaatggagctggaagctgtcatcctcagcacactaacgcaggaacagaaaaccaagcactgcatgttcccacttataagtgagagctgaacgagcagaacacatggacatatgaaggggaacaacacactctggggcctgtgaggtgcagggagagcatcaagaagaacagctaatgggtgctgggcttaatacctgggtgatgggttgatctgtgcggcaaaccaccatggcacacatttacctatgtaacaaaccttgacatcctgcacatgtaccccggaacttaaaaataaaagttgacaaaaagaaaacataacttacttttaagcacatagtgtgtgtgtgtgtatatatatatgtatatatgtatatataagtatatatgtatatatgtatatgtgtatatatatgtatatatatgtatatatatatgtgtgtatatatatatatatatttagatggagtctccctctgtcaccaggctggagtgcagtggcacgatttcggctcactgcaacctccacctctcgggttcaagcgattctcctgcctcagcctccccagtagctgggattacaggcgcccaccaccacgccccggctactttttgtattttttgtagtagagacggggtttcactatgttggccaggatggtctcaatctcctgacctccacccgccttggcctcccaaaatgttgggattacagacgtgagccactgcacctggcccatgtatttttaataatacattgtaaatgatttgacattatccatcccatattttatatgggcttagttatagattcactctagaattgctggttatagggcaaaaatcattcttttcaagacttgttttaacttctagtccttcagctttgtgaatggaacatgtacgtatgacctacaagggatcaagggaagacaaggatcctctgctggaaagatctgcctcccttaccattgctggaccccttttgtgtgagttttctccttcatgccatctgtaccaaaggtgaccatttggttctgaatccaaactctagattgttcttcttatagtgcttcaaaagaaagactgcaagccctatttctatattttatatagtatttgtaattttatgttatagaacttgagtcaccatgtatttcattcattcagtagatgttgagcctccggaatatgccaggcacagctgtagatgagggagatactgtgaagagaggcagcgttcatggtgtttacccgaggtcaacagaaaacaaacaaggtcaatgcagagagggataagtactgtaaagaatgcagagcagagtatgacatgggcaggcaaggtgacagaggggctgaaggagaggttactttagatgctcagggaaatcctatgagagaaggtggcacctgggcagacctgactgacaggaagaagccaccttagaagatctgggggaagaatgtcccaggaaagggcagaagccctggggtggaagcgagctgggcatgtccatggaagacaattctgagatgtctcggcatgctgagggaaggacagtatgatataggcagggtgcctataggccacagtaaggatttttaagaattttattctaagtgtgatggaaaaccactggcggtttttatgcagagtaatgacaggatccgatctatgtattgctcttgctgcactttagagaagagattttaggaaagcaaaagtggaggcagaaaaatcctttcatgtcagtttaatatatccttaaagagaaggtgaaatttgctttcagctttaaatgacacagagagattacattctggtggtaggaatgtggtcttttacagagcttttgttaccggggttcatgtttccattttctgggaactattaatatatatggatatttttgccagtaactcaagtaaccttgcttggtaaatttcataaaatgttgcaagaagtatcttgtgggaaggccaggttaagtgtaggtaaaataaaagctcacttaagtggttcgatttcaggtcaatacttgttacccccaaaatagtctacaagaacctctcagtactctcccaaacacatctgaagtctgaagactaatattctataaattaatttatgccttgtgctatccagtgaggatgataattaaggtggctttacctaaggcagttattttcatcttgatatgaaagtctcaagatcctttgcagagacaagttttaatacttgggaagcaagctgctttgacatgtattgatgagatagggtaaaataaattaagaaaggatttagtaaagacctcaataatgccaaggatgaattcaacttcttacatactgtattcagatttgttcttgctcatggacctatgaaacaaatacatacacttcatatgttgagtctttgttgctattagatctttttttttttttttttgagatggaatcttgctgttgtcagcctgggctggagtggaatggcatgatcttggctcactgccacctctgcctcctgggttccagcgattctcctgcttcagcctccagagtagctgagattataggcgcccaccaccacgccctgctaatttttttgtatttttagtagagacgtggtttcaccgtgtaggccatgctggcctcgaactcctgacgtcaggtgatccacccgccttggtctcccaaagtagtgggattacaggcatgagccactgctcccagcctagattttctttatttcatttaatggtcttagtctgggttctctagagggacagaactaatggaatagatatacacataaaggggagtttattaagtattaactcacatgatcacaaagtctcacaataggccatctgcaggctgaggagcaaggagagccagtatgagtttcaaaactgaagaacttggagtctgatgtttaagggcagaaaggatccagcatgggagaaagatgtagactgggaagctagttcagtctctcttttcacatttttctccctgcttatattctagctgtgttggcagctgatgagattgtgcccacccagattaaggatgggtctgcctttcacagcccactgactcaaatgttaatctcctttggcaacaccctcacagacacacccaggatcaatactttgtatccttcaatccaatcaagttgacagtattaaccatcacagtctatattggtcatcttcaaggtaaacccagaatagccctttggaaaagaactataactaattttatttttaattttataactagtacattttagccacctaataaatatttcataataaaagttattatggccattatattatagctgcaggatctgtagactctatatgaatgaaccaaaacagcaactttcatgacactgtcaaattcagcctatgcattagatggtgtaaatcataagccaccagaaagaataatccatcaaaccaagtattggttaagaatctactatgtgtcagcgggcgtggtggctcatgcttgtaatcccagcactttgggaggctgaggcaggtggatcacttgaagtaaggagttcgagaccagcctggccaacatggtgaaaccccatctctactaaaaaaaaaaaaaaatacaaaaattagtcgggtatggtgatgggcacctgtaatcccagatacctgggaggctgacgcaggagaatcgcttgaatccaggaggtggaggttgcagtgagctgagatcatgccagtgcactccagcctaggccacagagcaagactccatctcgaaagaaaaataaaaaagaatctactctgtgtcaaacatcatcaaacgtagatgggaatgtaaaaaatagacagtagtcccccctttatctgcagggatctgttccaagaccctcagtggatgtttgaaactgtggatagtactgaaccctctatgaactatgtttttacctatatatacatacctatgacaaagtttaatttacaaattaggcatagtaagagattaacaacaataacatgataaagtcaaacatttataacaacatcctgtaataaacgttatatgaatttggtctctctctctccctgtctctcaaaatatcatattgtactgtactcacccttctcttgtgatgatgtgagatgataaaatgcctacatgagaagatgaagtgaggtgaataacacagcattaggctactattgaccttctcatgatgcattagaaggaggatcatctgttttgggtgattctagatcatcaagctatgacaatgtcaatggttgaatatcaggagccgatgatgtctggaactttctatttaatatttttgtaccacagttgaccataagtaacagaaactatggaaaatgaaacttcaaagtgggggactactatattgcaaactatttaccaggctcttatatatatcatataaatgcttttataaatatctgttgcaaataatttgttgttcaaatgatacttatgacaattctaggttcttaaaagaaataataaaatatatgcatccaaacttttaaagaactgtatgtatgtttcttgggggacataaaagtactgacctttgtccaagtaggcaagatacacaaaactcttttgtgttgtcaatcacaataaaagcatggaaaggttaaagggaacaatgtgagtacttgaaacatgcgatgccaaaagaaaaatcttggcttgatataaaataccagtgacttatatggcctggtgagtcatgtgtatcatatctgggttatgtagccataaatattggcttaaaggcagtcagactatttagactgtcatcactaaaatcatcatcacatgtcggttctgcctaaattgaaaagcaaaaactgaaatacagtaatacattgaattgacaacatataaaatttctgctgtcctacacttaaattcccaaaggcaatgttacaagagggtgtttaaaagcccatgaagtactccttgtaattctatctcatttggatatatctttcttggttatttaatgttagttggaagcctctaagagcaagaattttcactgacttctcaataaaattctctagatgatgtaaatcataacccacaacatctgaaaatagccaggttaatcaaacaccacatatacaaagaaaacatagtgtgtcaaactctattaaacatggcaagaaatgtaaataatagttacaatttattgaccaattgccatttgctagaatctttatcaatcctgacaatatcccttcaaggtaggtgtcatcacctatattttacagatgagaaacaaaagctcacagaggttaagccacgcgtccaaatttgtagagaaaatgagtagatagaatttgaaccctgtctgattccaatttttgctgttttttaaaaaatatataaagcagataagattttagaggttctttagagttgggaattttgcctatgggagagttgtaaattattatggctagagggaagactgtgacaaacttattttcccaaaatggccacaacaatatttctagtctcgtatgctcttctagaacacgtgtgttctagaacatacgtgttctagaagagcaattccgtttccccatgatgagttggaatagatgcccattttccttgaagttaggtatgtgtttgtaactgctttaataatagaataaggcagaagtggcactaggggacaactgaggttaggtgttagaaggtgctaactaacagaagacagagaaaattgcagactaaggatgttagaaaatcttattcttcataaaagcaattagaacactggcaaaatggtcacaaccagtttttttttcataactctgaaaattagctataggcttgtggcaatatcagaaacatttattcaagaaaaatcattgaataatggtaagaacagtgagctttttgtgttttaacttatcttatttccatactccacacatgccctctcccagttccatggtatgcttgaaaatgaacagcctgcaattacagcaaaaattagcagcctgacaaccactggaaggtgcggaataggactggggccccttcaaagccccatctccagagaactgtcattgtttgacctgcctgatggttccctagaagaccccattctcaaggctgcctttattgacatgactcagagcttgctcagcacaaacagcctttatcctgggaatacttatcaaaaatgttcaatgattgtttaatgtcatggaaatctgaggcaatagataacagctgaggcaaacaataggc

SEQ ID NO: 97391 - DNA, 16457 bp, Homo sapiens
cccaggctgcctccctccctcctccattctctattcctcttgggggtcctgacctctctggcactgtgtctgttgagtggattcaggtgatgtcactgccccttatctgcactccctgccgccccgtgccagcagagtgcccaggaggtacatgggaatgagtctgatccaactctggccacattcctctccttccagaggtgagcgctacattggcatgtggcaggctggtcagcgccacggcccaggggtcatggtcacccaggcaggtgtctgctaccagggcaccttccaggcggacaagacggtggtgagtggagtgtatcctgggctatccctctctttgcaccccactcccgctgggggcactgaggctgagctgaggcctttcagggagggatgggaaagggggctgtgttcctgggtgctggagggagccagaacctgggcaggaagccagctctaccacccacctcccctggccctggccaatccctgctctgcctgaccttggtttccccatcagcaactcaggttaagaatacttaccatagactcaatgaactagcaagaatggagcacttgctcatgatgatgcattagctgacattcacagagtcctaacttgacacctggctctgggctaagctcccaccctgatcttgtgggatcttcccaagagccctgcaggttgatgtcattattatccccagtgtgtccctagtgaatgacaaatgagaggttcagagggatcagaggacctgctccatgtcaccttcactgagtggcagagctgacactcacaccctggtctgctgagcctggccgccgagcctgggactcccatgtttgcctcacccatacccttccaggtgcctggggaatgtggggctctggcctgatggctgttcttgttattatggtctgttggtttgtttatgctctacttcattctcgaaaggattgaaggaggccttcaaggaaagaggaagacaaggggaagaataagtacacaaaacagatttggaaataagccgaacactaattgtaaccctttcggctctgagcttcccggcagcccatggggcaagggagcctggtcagctctgccgttcccagggccagtgacaagcagggaagcagggatgtttcagagaaagccccacatttcttgagctcccaagggcttcctgaagaagccgctggggtgaggagccagggcggagggtgtcatttggggaaatccagggatggggtcctcggggctggtgcttagcaggccaaaggctagagtcccaattaggtacagtcctgtggggcgtgatgaggctcagggcccctctcgccatgtgtcagggcacatctcccttctttggccatctctctccaccctgagtttcctggcccttcctcacccaccctttctaccctccctggcttcctctccccaagggcccgggcatcctcctctctgaagacgactccctgtatgagggcaccttcaccagggacctgaccctcatggggaaggtgaggaccactgaggcccccctccacaccctgccaaggccttggttggtgtctgtaatctccccacttagactcagggctgggggcaggtaggggagggcctgtcccacctcccttggagccaaggagtgggcacagcaactccaccctgccacagagttgcgattgattctggagtgaggtgagaggggaccagtggccttgcctgctatccagagggtaccggtggtctcctggctgtgtccctccataccctcctagttcagaatacacgccctccaccagtaccagtgcctcgagcagctgtccctggaggcactggccttcagtgtgtgcctccctgagctaacccaggaaaaggcaatgtgtccccgctggagcctttggaaatgtaggggctgttttggtttcataatgactggagcaaaggggtggagatcaggttgctatgaatgggacagcctcatgtggcaagacaccgccctcctcaggcgttgcctgtccctgggcttacccccaccccagcccctcagtggtggtctccccactcttgcctgtgagtcccttctgcatctctctcctcttcctacctcagaggtgagcgagcccctgagacgtgggcacagctgttggtggggggctctggcaggcatagaggattatgaacccctcagcatggagcagcttgaatggatggcgggaagcccattcattagtccttagcctctctgacactgatggacaggcttgtggcctgtcatgattggctggaagggtaactgggcagacagacatccctgctccttctcctggctcccagggcaaggtcaccttccccaatggcttcaccctggagggctcgttcggcagtggggcagggagaggactgcacacacagggtgtgctggacacggctgccctcccaccagacccgagcagtacctgcaagaggtgagtgcctggcccctctggctctgggcctatctggggatgtgtctgtgtttccatcccaaagactcaggtctcctcagaggggcctttttgcacccacctcttagccctctagagagttccgagagcccagggtgtacaactccagtcagagactcttgggatcaggggctgtgtggatataatgcggtacaccacaaaactggagagaaatattatttgtaggctttgcttaggtcctgcttttttttttttttttgtcttgaaaggatacaatacggtttacaaaccaaacatacaggaaaaaaaaaatagaaaataagagcatatgttaaccttaaaagaaagggatatgtagacatgtcctacggcatttacaactgatcattgagcctggctctgagtttcctggcagccaaggtaaagaaggaaacttgctaagtggaatcacagtcattatcaaggagtattccagagaaggatagacttcttttcctgtaggaacagagttcctccttggaaaacagttgctcttgttgcgtctgttgaggaagactcagtattgcacagaggaaggaatctgtgtgggtggcagttctaatgggaagtggtcccaggcagcatttcagatgtagggagggagtacagttgactacttggcccgctgtccctgcatgctgcttctccctgacagcaggagctgggagtggacagcaatccctaggggcaggccccagcccgggtgtgagtgtgggctgcgtgtagcctacgagcatgacactggagtgcagggctccattagacatgcgcagccaggccccagcctgttggccagggcgggatcaaccacaggaaggaaccagctgtaagggagggcagagggggatgtcttggaggggaatcccagactttggacactggtctctcttggaccaagaccccctctctggcttggcctccagatctgcccacctttctgtctccgtctttccaggattccatatgcttctgtctgtcttctcgtcgcagggtagattctctgtccctttctctgctgctcttcctcctggagccgtggaggtcagccccctctgcatggttcaatccatccacccttcttggggcttgatcctgggccaggctcatacccccacccctccaagggcctgggcagagtcctgcctacctcagctccatctctctctgccccatcacccaccctccatccccatcgcaggcagctgggcgtgggtgccttccccgtggaaagccgctggcagggagtctacagccccttccgggactttgtgtgtgctggctgccccagggacctgcaggaggccctgctgggcttcgacgtgcagagctccagggagctgcgtaggtctcaggattacctgtcctgcgagaggtgaggccggctgtgtgagcatgcacaggttagggtgggccggggagggcttcctggggggagggggctgggccgaggtgtgggtgagggatgctgtgtgtggtgcccaggacccaccctgaggacagtgtgggcagtatggaagacatcctggaggagctgctgcagcaccgggagcccaaggccctgcagctgtacctcaggaaggtgagagccctgctggggtggccaagggggtgacattgtcactgtccctggtggggaagggctcccatttttcatagcagggtgctgactgaaggggacaggcctgtggatcccttgtcctcagaggacctcagtgttctcgtgtatgagatgggagaagtgttgggaggctggcgtgggcatgctgtgctccagaccccggtgcttagtctctctctgttgcctatgcactggcccaggctctgagcaactcactgcaccccctgggaaagctgctccggacactgatgctgaccttccaggctacctacgcaggtgtcggggccaacaagcacctgcaggagctggcccaggaggaggtgaagcagcatgcccaggaactctgggctgcctacaggtgggctcggtggcaaacgggacagctactgccctgtgacactagtgtgccctttccaggcatcagttctgccttgcatttgggaggaatgccaagtgtctgattcaacaatgaaccagaggcttggtcagtgtgcagctgctgagcaaaagggttagagggtggggaggtgagagcaaaggcccagctgcagccctcagctagagtccaagacccaaccaggcgctgggctgactctgaccccaggtgcactctcaccccactgtaggctgagcttggccctggactcggaacacacctgcagtcccaggctgggctgtgaccccatgaaacactgcaaatagaagccttagatgctatagttccttctgctgctggattctcaggctaacatcctggagctccaaccttctaacttctgtggtttgagaggatgaaccctgcaggccatgtccacagttctgagaggccacctgcttttgcctttgttgactggtggtagaactccagttctgtggcaaggggcagccacaccatttctctctcattgactcacaggggtctgctgcgagttgccttagagcgcaagggccaggccctggaggaggatgaagacacagagacaaggtgactggcgcaggtctccttggggcctgccgtgtccagggaggcctcatgcgtctgctcctaggacctcccttggggaaagaggtgcttctggggaagtgctgggcattcactctattgaccaaacattgtgcattgatcgtttgtggattagaatgacccatgacctctgttctgtgaggaaccagggagggggcactgctacaatgcattgaatgcatctttgttctaaatgtatgatcccaatctcatctttcgcatgcagaaggtgagtagctccccgaggcaccctcctctccctgcacacagatggggaaaccgagggctggtagggatgagcctgaggttatacaggagttaggtgggcatgaaatttgtttcccccagtccctggagcaaaccttacaatttgcctttagattctagacctgaaagtgttcctgatcagagaggccttcctgtcactgccttgcaggaggcaagggaaatggggttagacattagggaggattccccgcccggagtcctagcacagcaaaccaggaggtggaactgaatcagcctggaatggctgctgagagctcagctgcaagttgctggtccatctggggccctggttttgctttcagtcaaatggggatccaactcctgccccacctgccatcttggttgtcaaagtcaaaggagggaatgaagttatgaattgaattgggcaaatgatgactgagaacaggcttggaaaaggttttctggggaggaggaggctggaggccaggacactgtttgttgtggaactaggagctctttgagacgagactccaagtagtaatcccagaccccaccttgctcatcccaacctgttccggtctccccatcagggacctccaggtgcatggattggtgctgcccctcatgctgcccagcttctactcagagctcttcacgctctacctgctgcttcatgagcgggaggacagcttctacagccagggcattgccaacttgagcctctttcctgatacccaactgctcgagttcctggatgtgcagaagtaagccttcccttcccccgtgccgtgttagccaggactcaaactcgactcagactgtcttyagccaaaaggtggggctggggttgataggttcatgtacccaccaagttctaagcttatgcattcaggtgtggctggatctaggtgttcaactgaatgacagagggaagcaccttccatttctgttggtctttctcagcctcccccttgtggtgacaaacaccataagcaccaaccgctcaaggttcataccctcccagctcctctcccagagtccccacaggagctggcattgccttccaacagctccctcagagcccctgaagtccctcactggctcggcttggggcttgggtcttgagcccacccctgagtgccagccgtgattgaccaggcctgcctgaatatccactgctgaggctggggcaagatcacctgctctgagcacttgggctgagagtaggggagaggaggtccctcaggggagactgaggactgctctgggtgcatgtcgggaggtgtttaccacaccccagggcctcccttccaccctcagtctccaaaatgtcctttctcttcagtgtcccatctatccattgatgccacaagtgaccccactgtccacagtagagggcacgggcactgtctctgctcccacatccaggtctcctttgttacacagggatggtgcttcccacccaccctgcaaatccctgtttcttcctctatcttggtgactgtgtcctgcatctgaccagccaccagcctaaagacctggctgccagtgcttcccaagcatgccccgcctccctcaccacctcagtgtcgcttccccacaccagcctccacctctgctgcatgagggctgcatccccctgctcacagccctgtgctggctcagcagagcctcctggatggagtgcagtctcctcacccctccctctctactggtcaccacgacctggctcatacaagcccctgggccgcccttacctccctggagcttctggagctctgccttctccaggaatccttccatcctccccatgacctargctgatctccttccccttttcaggacccagatctgccgggggaaacagtggcatagggaatttgccctctgacctcagactctgccccttgtcgaggcagagcctcctgtctcactttttcaatttcaggcacttgtggcccctcaaggacctcacgctgacgagcaatcaggtgagagsgaggccagagccccaagccagggrcccccagaggtcctgcaggctttgaggagccctttgcctcatgattgctgggcggaggctgcagaggagctggggaggggcagggtggsttgggaggagacactgtcattctgacctcccagtgtggtggaggtaagctgttggcctgtaaccaccaggctcaaacacaggttcttacctggctgtgtgaccgtgtgcaagaggctcgtgcaccgtgcctcagctgcctcatcagtaaaagggagccaacactagaacaacctcaaaattcttattttatttatttatttatttacttttygagaaaaagtctcactttatcgcccrggttagagtgcagtggtgcgatctcagctcactgcaacctccgcctcccgggttcaagtgactaacctgcctcagcctcccgagtagctgggattacaggcgcctgccaagtgctcactaccatgcccagctaatttttgtatttttggtagagacaggatttcaccatgttggccaggctggtctcaaactcctgacctcaggtgatctgcttgccttcgcctcctaaagtggtgggattacaggcgtgagccactgcgcttggccagaaccacctcaaaattgttgtgagggtgaagtgggcacatgaggcagctgttctcaaaatgtgcctgccaggctggaagcatcaggatcatctgggaacctgttaggaaagcagattcttggaaccacctcagacctaccgagtcagaaatgcagggagtgggcccgggaacctgtgtttcactaagcccttgggtttgagaaccatcgacataggcactcagaactgggcggcacccagtggccagtgcctgttatgattattatcttcttatccgtttggatcctcccaacctcatggagactattcaccccgttttatggttgcacaaactgargcccacagtggagctgtgacttgccctgggtcactcagccctcagggtggggctgcactaaagctggcagtgaagggaagggtggcgggggactcaggcccggccctgggaaggaggggatgtcagagctggggggccatggcctcatccagcccactccctccaccatgcagaggtactccctggtcagggacaagtgtttcctgtcagccaccgagtgcctgcagaagatcatgtgagtgtgagccgtagtgggttgggggtccggaggcagagtgtggggtgctcctggttgggactgaaccaagggccttgacctggagccagctaccctgctgcaggaccacggtggacccacgggagaagctggaggtgctggagaggacatacggggaaattgagggcacggtgtcgagggtattgggccgggagtacaagctgcccatggacgacctgctgccacttctcatctacgtggtgtcgcgcgcccggtgaggcagtcaggagctgggggtgcagggcaggggcagggtcccacccccaaccacgatatcttctgatacctctgaaccccagggtttatggatgcagcttctctctgtacagatggggaagccaaggcccagaaaagggagggtcccagccagggtgctggggtgctagaggtagagtgaggaccacaccccaggtgtccagccatccaggccagcgctccttccccagctgcctgtccgcgacaggcctcttctccttgtctccctcrctctcttggtggggcggtgttctccagaattcagcacctgggagccgagatccacctgatccgtgacatgatggaccccaaccacacaggaggcctgtatgacttcctgctcacagccctggaggtaagggacaggggctgtggaccgaggtggaaatgccctggcccctggggcagacccttttcccttcccagacatcataacaccatagtgggagggagctcaaattcacagctcatgtgtgactctgggaagggtcctcacagtgtccctgatcctgctcttattaaaggagccagggaggggtcccacagtgcatcccagccctggggaccctggggccatgattgctccatgctgcattcccaagcacagtgggagaggaagggccccattttcctcgcagactgtggctgagggctgagttggagacacscctcctctgggttgggaggtgggtgcacacagctattgagccctagatcctgtgcatgtggttgggatcaggcaggtcaactggcctcagccttgcctctctccctccagtcctgttacgagcacatccagaaagaagacatgaggctgcaccgcttacctggccactggcactccagggagctctggtagcctggcctttcctggacagactgaagagctgagcagggcactgccagcctgtccctcattacccaaggcaaggggcaggacaggccctcagaagcagctcttggaggagatgagcattttgttttgcacaggaagatgctgctgctgccctgactgggatgagggtgaggggtgacgggtgtggccctggatgtggtggttttcccttggccactagcccatcttcaatgaccccttaatctgcagcagctcacaggctgggggtgaggagtccctggcttctcttagcctgagcctttctcccaagttccagagcctctccgggcctcagtgctgccatctgtacaatggtggagtgagtacgctgtaaaggaccttccattcattttgctgaattccagagtccttttggaaaactgactttagtctgctgggctgtattgacctctggcaggctcgaagcctcactgggtatgcagtcaacaggatgggcctggagatccgtgaactgcaggccacgtacccatgacgtaaacggcggcactggagcaagctggggcggggggtgggtaaaccctcactgccagcaggccccaagtggcttgtaaatcattctcctgtgaygtctgtgggcctgcgtggggacaacaggggcacatgacatctrcctgggccctgaccaataaaccctcagacccaggacccaggaccctgctgtagttggggagcaggagtacctttgggaggggaggactttatttaaacagtggttctagtgtgggaccaagagaggcaggagctgggtcttggggcagctttattcctgttgggcctcagtttctcttccccacacagtttatcttccgtcacattgtgccgggtgacgtgcacggtctccctctgccctagccggagatgcatgatgacaggcagtgtgatgtgttctgaaagtgtccagggcaaagcgtagggagagggtggatttgtgcagggtgcagctctggagaagaagctggatcactcttggtcccattccctaggccctgagcaagtcaggctcctggctctgggtgtggctcccccaaacgaagtactgacttcagcctgtgaggggagggttgagggaggctctggaaagcccagccacacctgagtccctggcagtagccttggggcagagggcacccgcagagtcccagagatgatgtgggcagtgggcagagagagccttggcgcctctgtttgccaccacttccccaggaaggagggacagcatttctctggctggttccactaaatgtgccagcccaaatgcagggcatgggctctggttctgccaggagcctgtgacacccccaggaagggggtggaactgaggaagagcgaggatatgcaggcactcatgcttaccgggactggggcagctcactaggattctatcctttccaatcggcatcagccagctcttgtcccctgataagtgaggacagcctgaccctggcctcaaatgcagccatccctgagttcatgcgatgctgacgggaccccagcacacttccctgcctcctttgagatctgcgagcccttgctgcagttcagattcaacaaggccctctgcccaccctctcactaggcctcacccaacaccagtggaactggagcctctggctgggcacagtggctcactttgggaggctgaggcaggaaggctgctggaaactgagagttcaagaccagcctgggcaacatagtgagaccctgtctctacaaatacaaaataaaataattagctgggtgtgttggtgtgtgcctgtggtcccagctactcgggaggctgaggtgggaagatccctgagcctggagggtcgaggttgcagtgagcggagatcgcacctctgcactcaatcctgggtgacaaaatgaaaccctgcctcaaaaataaaaataaaaataaaaataaaataaataaaaaagagcatctggacagagcctagggggctgcagtgttttaaaagggtcctggaagagtccaagggcagacagagctatatcagacccttacaacgaaacccacagagcaggcaggcaggcaggagtccttcctgtagatgagcctgaccactgcagtgagtgcttcatgcacagaagacccacccagtccacattccagggtgacctctcccagctgctgcaggagcccctggctgcccagagagcctgctggtgcccagtctctggatggcagggttggccagcagggaccctagcacctcagtgatctcactgatgttcagagcagcctggcagggcccagctccagtccctccaccattctagttcccacctctttcccgggatgaggattctctcttcagcggtgatcttgaggaagtgctaagattcttcctaataatcccaaatggcacttcacaatcacctgggacagagtggagagaggcacagggagacacggcccattcacggactcaggcagtttcctctcctgtaagggctgagtcccaggctacagtgggactcaaacacattggccttgccctcgggggccaggatgtggggctgagaatgacagatacccaaggggccaaaggccttttcagtgagcagatgtgtccaggttgcacagccggaccacctgcttatcctagacggcagccctggccctggacaaccgccccacccacaactgcacccgggcctgcatgcagtcaatcatacaacctctagtcctgcttcccccaggcccactactcccttcaccagtcaactccatctgccaccctgttctgccctgccctcctgctcctgcccctctcactcatctcttttcttgcagaaatgccctcctccagtcccactaggtcctaggcagatccatccttgcaggcctaggtcatatgaagcccctgttcccctaggaagaaggcttctctcttcacagcccctttccagacccgggcccatgtttcattgctttggcgggggctgtcttgcctccaaagtcaacagtcctctgtggtgtcttcttcccatcctttccccgggcacagtgcaggccgcctcgccaggggcctgtgctccacagcagttggggacgaggacagaatacaggttgacacgggaggggttggactctgaagggcctgacccccagagtaggtcagcatctcagactggctggagaagcatccgtgcaaacaacccctctggtgtgtccaggatggacgggccccagggaaatggagccccgggcaaacacaggccaggagtagacagcaagttgatgctgatgcctcaggagaaggggaagaaaagatggacaccctctgtgccttgctccatagtcacacacggcaccagaggctcaggcctggccctcctggggccgtgtgcccacaccaggcagctatgatgccagtgtggcaggacacctccaggcactgccctactgcttggttggagctccagctgcaggaaagccacagagtggcgtggccaggctatagccagtgacccagaggtagtggtggatggagagggcgtcctgaaagggaccagggcacagcatggccccatgaagtcctctgaagagactgctgacttctttgtcagcgagcctccccaggggcctcctggatggcagccctgttccctgtctggagtatggtctggaacagctgccccacagtgggagctggcaggcatctgagggacccgagtgctgaccaagcctctgttcattcacaccacccccgaggatgctggagccagtgcgtgagcagggtgcccactgtgcatgccccttgcctactgcagctccagagaaggctggagggatgctgaggccagaggggtgaccaggggctgctggagaggtgcttagtgtcactgtgtgagtgaagcagatgctcactagtagggccctaaggagggccccaggacctcagctgtcactctcccagagggacggctgaccactggggcccagcaggggacaggggctgccctcttatgggcacctgggaaaggataaggcgagggtctgggttaaagtcagtgtgagggatacaattagggattagggttgaagtcagggtcagtgtcaagttagatttagggactggagtgagaatgagggtcaaggtcaagctcagatcgggtcagggcttttctggttggctttgtcaagggttgtacagacacgtactctggtgtttactcttgctgcgggcgagaacctgggatggggtccaggctgccaggtcttggtctctctgggaccttggccaagtccttttcctaactgggtcctgtttgttgtctgtaagcaaaggagctgcccagacaccctgttctgccatgaggagcaccctttgctgtgaagggcaggcaagagatgccgcttgggctctggatgcactgaagaggacccacgtgcgggctaagcactttatgggctttatctcaacttcctcatgaccaaagccccaggagtcacaacccaggaaacctaggccctcaggagcaagcagaaacacacactctgtccccaataaacagggggctgagtagctatgatggactggacccacacggcctcataccagagcccaggtgccagctgggtgactgcacgactccagcactaccaggtgcagagctggagcccaggtgtttggccacctgtccctgttccttgccctcaagacaggcaagtttctcccaaagtgatcttctcatatgccccctggctgaggcctggcccctcatgtccaaaagtatttgggaggaggtggaaatgagggagtgcggtctagtcatcagggtcaggtggaggatgataggtccagtggctcattaaattcagagcagtagctatgatctgtgaaaagcacacaagagagtgtttggtttgtttgttcgtttgttttggcagtagggtaccagcgataataagatgaggccaagggaggcctcatcagtgtctggaaaattaatcatgtttcattgctttggcgggggctgtcttgcctccaaagtcaacagtcctcagttgaggctctcttgagagaatgggtgtccaggagttagactgagggcagtggtaatggtctgggacaaggtgaccacagcattctgagacgacaggtgggccaggtgtcctgcaggcgagagccaaaagacgctaatggtctggcctctctatgcctccgggagcctagggtgttccttctcctccagcagagctgctccgctttttgaaatcctcactattcctaacccacagtgttcttctggaggtgattactatgtatcaccccagacgtgcgggctgcgccagcgtcactcttaggagtgatcacgcctgagataatgatcatgatcattatcatcaatatccacaactgcccagcgctcgcacgcagagccaggaggtaagagtgaccggattagcatctcccacaccaactcccaccttgcagcccacgggtcagtagcccaggttcctccatgcagggatggaggtgggcagagaagagtgaggaggatgaattatgcagcagggtctctcacagccagtgtgggtcttttcttattccccctccctacctcataactaaatattttatttaaatgaatggtaccttcctggagaattgccacaattagagtccacttatcttttcagttttttttttttttagttcatcttttaagtcacctgctgtctgtgggtggtaggcgacatgaaatgtcccacacagcagcccccagatagctgcctattgctggttctcttggctatgagggcggcatcattgtccgactggatgtgctccaggagttcagatatgcagcagtacatttaggacttgtcaagcagcacttcccacgttccccgcagatgggaattgctgtgtcatacccaagaatggcatctactgtcgtcagcacccagtggtgctcctggcagaaggggaaggggtccgtggagtctgttttccaggactggccaggtcagtgtactggagtgcacaggtcgctgtgtgcactggagtcactttgtcccttgactgtggagctggtacacttgcaggcttgcttggcctcatgtgctggcctcactaggctttgacgtgggccccagtcctgagctatagacagatggccaggcctcgtgtgatggtgtatccaggtggctctgatgcttacctgggctatgcagaattggtcagcttattggtttcactgacgttcactgccaaggggtccttttcactgggttttcagaggccctgggccctgtgcaatctgaagcctaatgtttgtcccaaccagggttgggacttgacatccagttgttccattgtcaagtgccagaccacatggtcagcccactggctgtgaactttggtgggggctgtttccagggcaagaaccatagcctgcaccactgcccctggccagacttctttcttcatatgcagctttcatcagtgttttctgtgggtcctgtagcttggctgatctgtctgtgaatcaggcccaggcctcctcagggactgcgctgtggtgaagttcacaaggagcctgaggtgctggtgcagaccccaggtctggggtagctgcccctggcgggtgattgccactttttcaggctgatgggagattccattgatgc

SEQ ID NO: 97392 - DNA, 14887 bp, Homo sapiens
tctaatattaatatagctactcttcctttcttttgattaatgtttgtatggtgtatccttttcagccttttactttcagcccatctcattatattagaaattaatggtaatgtttttaaatccattttgccaatctcttttagtttatgtatttaaaccatttatacttaatctaattattgatattttaggacttcaatttgatttgtttgttccctctgtttttattcctttgttttccttttcctgtcttcctttgagttacttcaacattttttagaatttcattttatctgtagtgtttttgagggtatctctttgtatgtttattttagtggtttccttgaattatacatgtgtaacttatcacagcctactggtgtcaacatcttactacctccaatgaaatgtagaaaactaatctccatttaggttcctttatcctgccccttaaatagtctcttaaaaattttctctacatatattgagaaccacatcatacaatgttactttgcctcaaccatcaaaaataattttaaaaactcaagagaatagtttattaaatttactcatattttacctttccgttgttctttcttcatttgtgatatttcaagcctccttttgtcatttcctttctctggggaagaactttagcagttcttttataaaagttctgttggcaaaaattatcttagttttctttcatgtgaaaatgtctttatttcaccttcattcctgaaggatattatcatgggatatagaaatctggatcgaggctgggcactgtggctcactcctgtgatcccagcactttgggaggccaaggcaggtggatcacttgaggtcaggagttcaagaccagcctggccaacgtggcgaaaccccatctctactaaaaatacaaaaattagctgggtgtggtgacgggcacctgtaatccagctacttggaagaccaaggaatgagaatcatctgaacccaggaggcggaggttgcagtgagccaagatcacgccactgcactccagcctgggtgacagtgagactctgtccaaaaaaaaaaaaaaagaaaaatctggattggcagatattttctttcagcacttgaaaactgtcgtgtcacctccttctgacccccatgctttcagatacaaaatccgttggcattcatattgttgttcccataattaatgtgtcatttctctctagttgccttcaggatttttttgtctttactttgctgaagtttgactatgccatggcttggtgtagatttctttgagcttttcttctttggggtttgctcaagttcttgaatctgtaaatttatgtcttctgccaaatttgggaaactttcagccatatttcaagtactttttcagtctctttttctggaactttgatgacatgcatgatagatcatttattatggttccacaggcccctgaggctctgtttatctttttttaactctattttctgttgttcagatttgataatttctattgttctatttttagattcactaagtccttactctatcatctctattctgctattgagcccatccagtgagtttttcaaatttttgttattgtattttacagttctaaaatttctatttggttgctttttaaaaaattattcgctgagaatttcaatttttttatttgcttcaagtgtgtttgtaatggctaattgaggatgtttatgattgccacttaaaatctgtttcagataatttcaacatctgtgtcatctcagtgttggtatgtatcagttgtcttttctcattcaagctgaaatttccctggttcttggtttgacaagtgctctttttattgtcctggacactggaagaattatcttatgaatctccaaatcttatttaaatcttcttttttagcaggcctccactgacaccacactggtggagaaaggggcacatcacctggttactgccaggtcaaggtggcagtccagagatcctggcttcccactagggctttgctcacaggagaggggatttttttttttaattgtggtgcttggtttctgtcttttttagagtgaacctttcctgtcctttggctagaggtaacaggcttttttcagggcttttttgtgtgtgtctgtcacagttggcatttctggcttgctggcttctttagcacacaacattcaggatatagaggcagcaaaaagaaaactcagggtcatagtattcctcagttgccaaggttcctagtcagttggccttcttctctccacccttcagactcttatctttgttttatacataatattcggagtttttagttatactttgtgggaggaataagaagtgcatctattccatcttgtcaactagaagtcagcccatctggctgggcgcggtggctcacatctgtaatcctagcactttgggaggctgaggcgggctgatcacctggggtgaggagttcgataccagcctggccaacatggtgaaaccctgtctctactaaaaatacacaaattagctgggcgtggtggtgcacgcctgtaatcccagctactcgggaggctgaggcacgagaatcgcttgaacccaggaggcagagattgcagtgagccgagatcattgcactgcactccagcctgggtgacagagctagactctgtcaaaaaaaaaaaaaaaagtcggcccacctggaaattggtttttattaaagactgaaatttgacatggtggctctttatgtaagtaacctgttgtggaggctaaagtaactccatcttggatgctaatccactatgttgacttgtgattaaccctggttccaggaatgcctctgagatttccagttcatctattgttccttgtgttaagagcacatccttaccataaatcctgcccttagatcaaactcctactcattccctctgaaacacgtgtaccttttcctgtggtttataatccctgggtctgggggtggggggtaatggtgtggagatctatctgccttgcagctgctcaagaccatacttctgtccataagttccccgataaaatcaccctgtgatgacaagctggacttatctgcctccttctttggtttctcagccccttctgcatttgggggtcactttgcttatatagccctttcatgaaacatgtgtactagcaaaatactaaagatttatagaaaggggttgggcacagtggctcatgccagtaatcctagcactttgggaggccaagatgggtggatcacttgaggtcaggagttcgagaccagcctggccaacacggtgaaaccccgtctctactaaaaatacaaaaaattagccaggtgtggtgctgcacacctgtagtcacagctactcaggaggctgaggcaggagaattgctggaactcaggaggtggaggctgcagtgagcttagatcatgccactgtactccagcctgggcaacagagtgagactctgtctcaaaaaaaaaaaaaaaaattatagaaaggcctcaaagcatttctgaaattagcttttccttaatgcttagtgtgaatctttattgcacattttaaatcatcttgaaactgcctttcccaaactttgcatcagtggttctattaagctgatggacagtttcactccattagaaaatgtcaaatttggtacacatccaggatcagaggaaggatcacaggagagcaagaaactggtgacaggactagttcagacacactagagtcagcccactttccactgctcacatagagtgacacaagcaatgtgtttaaatgaaagaagaaaaaagttcaggtgccacaaagatagaaagctggactcactgcctatctacagcctcagttttatagaatcgtcagttgctgttggcgttttgcacatatgaactggtacataagtgaagaatggatgggtacgtggttggtgcctaaaggtacggtttcaatcccagttcctcctacacactacccagaaggtcccagaaagccctgttctcctcagcaggcgctccacaacagcagctgcagaaagcgcagccatgctaacagaggcgcccccggagttttcccatcttcaccctcacccaacacctcttgggtcattttctcctggtctgtcttcacaagccagaaatggttgatactgattcggtatgggtttggaagattataggtttctgatttaaaaggccttatgtcatcagggtccaacagactttctttctggggatttctgtgttctgaagttcagacgtcctttgttccttcccttctaggtcagtcaccacgaacaggggcactcggcatgctgccccagcactggagaagcagcgctgtgggggcaatctgtcacactctcagagtctgggacttgacttgctaccaacaactgctgtgcaattctgctgagcaggaatatcatgagctgttcaataatgacggacgcattggttgagatgaagtttccagtaaggaagtgacagtgcaatgtggatatttatggctgtaaaataggaagagctttagttcccaggctgaacctgccactgctggagccatttcaacaaggcatcctcacaacaaagaagagatgtgatttggtaccatttcacaccagcaggtgtctggacgaaaacatcaatgtgaataagggccaagtgcagtcctgtcttgattaaattacttaataatattattaaataataataggtctgggcagtattgtttttaacctgactcatccagctgtccttcaaatagctccgtctccctctacccagaactgatttttaaaaagaagtaatttttctccctgggctgggaaaaccctaatgaactgaaacacacttttactttaaaatttttctgtctggcgtttttgtaatcatactattaaatgactctggagtcatgttaatgacaggatttgttttgtttggatgcagttcaattgcatggtttgggtaaaagctagcctacatacaaaggaatatgaagactgtggaagaaactgtatattgggtttaagaatttcagcaattatccggtaaaagaagaacttaagcattaagctgcaatgtcaaatccacttgcttcagtcttactagctgatgttgccaacagttggtgatgcctttttcagggttctacattcaaagcctgttaaagatggttacaggcaaggaggagtcacaggcagaggctaaagtatatctatcatcttttaaccctaatgcacattttagaaagtctcaaaaatctgttgctgtgatttttacatcttgtgttttttgagacagagtctcgctctgtcacccaggctggagtgcagtggcacgatcttggctcactgcaacaacttccacttcctgggttcaagtgattctcctgcctcagcctcctgagtagctgcgactacaggtgcatgccaccatgcctggctaatttttgtatttttagtagagacggggtttcaccatgttggcctggctggtcctgaactcttgacctcaggtgatccacccaccttggccttggcctcccaaaatgctgggattacaggtgtgagccactgtgcccagccctattttaaaactgaatttcttcaagcatctaaatcagaggctggcagaaactttttctgttaaggcccagatagtaaatagctgtttactttttatgggccatatgatctctgttgcaacgcctcagctttgtcattgtagcaggaaagcagccacagacagtaagcaaatgaatgagcctagtcatgccaataaaactttatttacaaaaaaaggcagtgggctggacttggttcaggagccagctgtagtttgccaaccccaggcctaaagaaagctggagaggaatagcttacacccagaaaagaacctctcagtgagggaaacagactaagaatagtatcacactacagccttctaccaacagatgatactttactttaaaatacaaaacaaaattagctcagccagttagttgttttattttgagttttgtttttttaaaaaaagaaaagctttgagaaaatgtgttaaatatcagtaaagggcaggaacacacatggctagctttacaatagcaatctaaacatacacaaaggcaaacattgagtaaaatgctagggaaagacggcactttgggggcctactgcagttttccttattgcacataaaggttgtggataackccaagtctttaatttttcacagttatactttaatgtcattttatataacgtttatttatataacatactataatgttaattttataaaaccaccagtttgctactgttgaatggaaatagaagacaaaattctccccaattacactatgtaagctctctataaaaagttccctagaaggtcacatcattccatgttaaattcgtcctattctattttaaaagttgcttttcagctattaaatgaatctttatggccttctcatttaaccattttcatggacatagtacaactttccaagtaaaaagtaccagatgtattttatgtgaaaaacaaaaggacaacttaggaggagctggccctactatgaagtcacactttgaacgatcaatttcagtggtaaattcccaatccatagacttaacacccacacaactgaaaatcatccctctgcttctccaaagcccacaattggaataatcacaacacaagtcagcccctaaatgtccatgcagttaagtcatccagtaacacctgaattgtagccttttttaagtgcttgagacagcagatgttgaggtttccatgctgtttacaagtccttttctatctgagttcctccaacatatacaggcccagacaattttccactggccaagagctgactgtgacacttggtgattctgttaagccttttgaaaggtggtcatcagaaggagaaggtgacttctgctgtgtgcgctcctgtctgctttggaccttttcaaagggcagcacagcaggcagcccttccttctcatcttctccaaggctcaggtagcagaaaaccggctgcctgtgtgttccatatgggccacgactatagtataccctgcttacaaaaataagactaacatcaaaaactttggttttgctctttacaatttttgctagcactgggtgacaagatgtgtttaattttttaaaaatgtctatgaaaattgacactggaaaaaactgtttatctctaggtcttgttttgaaaggattgttgatgagtctacttgcttttcctagttaagacactagcaatggtttctacagtatttctctatatgttgttttcaggttttagaaagggggatgatcttttcaggtatcaaagtggtaaaagcagtattcagatgggttgtttctaaactacaactcttggccactagattcctttgacttactgtatcagaatgtagcagccgacactggcaatccagagtgtcagttaaagaacaacagaatagctcagaactcaatgataccagtctaatgtatatgaaagacttgttcctgaactaattaatctatagaatcaacatcaaaaggcagacaagaaacttgtcaagttccccacttttgaagtggaataagaagtcatatacttgtgagatcagcaggctgactttctagcagccctcattgcagataatctttcacaacagatggtaaaatcagytttctgatacactcttagaactcacaacgggtgcacagtaggtttccaagtgggtgattttcacctctgatgagatgctctaacaccctgccactgtttttccccctaagtgcatcagtggtgtttctacatttggaaattacttgttcacattaaacatctggtatgattacattaacttctactgcagacaaggacagggagagataggatgatgggatgacgtcaaacagaccaacagacctctattttggaaggaactgttagttctttgtcctagaccraatcgttcatggatagctgagatacccttttgcatgttttctaaagagattccatttgtcagccaaaccacagaggacattttcgggtctagagaacacagcctgaagagatccttgctgtttgcttgatgaaacatttgatgtcgcagtgtgatttctgccttccaggcatcaatgcttatttgtctgatcaccccagtaaccaccctggatgctcggatccatatgcccttcctgtgattgtgtcctaggaagaaatgtggccttatttaaattccaaattttcttccctaggagagaaagttcaggtttctggtagttctcaaaaagtgtactaaaaggaatagcagctttcatcttctctctgtcagggctatacaaaagtgtgcatctccttaattacctgctacggaaaccaccaccatcaccatgtgatagcaaaggaccacaaccttctactttgctccagcagtaaatgggcccacccttattctgaggaatccagtgtggactcaggcatgaggataggtgaaggaaaagaaaatctgactccagaggggactattaatttaattccaggtgaaattaaaaaaaaaaaacaaaacagcttcccagaaaccttcatgcttgattagtyagcagctcagttaagacaataccttccctttattccccacaagtgggaaccaagatgacaggtttttagttctccccatacataccccaagtcacccttctctttcctcgaaggctccaaggttttcgtgatcttttcagctgtactttatggagtatgttcttgagttctgcaaagattagcatcaaactctctcacagctgccctgtctgtattactgatcaatactcagttcgtttcacatgactaacaatttaaaaaaacaccttcatctgctgggccattctttaaaatcagattccaaatagtctagaggtctgctgcgagctctagactaaaggctcttgtcaatcctggctgcacatcaagaacactcctgaggttccaaacaaagcatggattccaggtcccacctgaagctactgaatctgaatctctgaggggagggcccttgcactgatttaaaaacaaaaactggccagatgatcctaattcacagccagggttgagaacctctgctctagaacatcggactcggctgaactgtcgtccccaccaacccagaacaaatacgtgtataagatggacttgggtttactctcttggaagaactttgtttatttggatgtaccattacttagcagtttcaatctgatcttatgccagactggcagcagatagttggccttgtgttgaatgatgcctgacacggcataggcaaaattcttctagatgtggaaccacttgacgaatggattcacattcccaggacccctggtaaggtcagggttattctccacatcttacaaacaaaaattaggaccaaaggtcaaaaattaggaccaaagtgccttactttgattcaccaaatatttgtaatcaaataaggacttagaacactggaaagcagttctgattccaaatggctgacagctcggggttagtgacaaaggcaagaaagggagaccagcctgcatttccagcttcctaacacacaaagaaaggccggggtagggttactgggcaaatgctgcaactagattctgggccctctcttccctgggtaggacttctgggtgggcctcctgccctatacaaaccatccccaacccaccttgtttacattggaactacactgtcgtagacagcaattcagggaagaggacaagccataattaggatttcctccctgtttcccctgtcatctccacacaggaaaaccctgatgggaagcccacccctctagttttggtcttggcaatctacatttccttgtatgtgagtagatcagaatcaaatgtttgcagtgaagactacaagaccctttggggataaacacaacactctatgaattgaactaagactaggaagggaaactgggtggttatttttcttccctaagagagtcatttcttgtaatcttgtaaaagctttctaaaaaaaactcaaaataatggccaggggcggtggctcacgcctgtaatcccagcactttgggaggcagaggcgggtggatcacgaggtcagcagatcgagaccatcctgcccaacatggtgaaactctgtctctactaaaaatataaaaaaattagctgggtgtggtggcatgtgcctgtaatcccagctactcgggaggctgaggtaggagaatcgcttgaacccaggaggtggagattgcagtgagccgaggtcatgccactgcactccagcctgggggatagagcgagactccatctaaaaacaaaacaaaacaaaacaaaaaacaaacaacaacaacacaacaacaaagccttgaggtgaacaaagaaccatcaccagggtgtgtctgttagttttttccctccaaaattaagtaagcaatataagataagcaaagctttataaagacccaaccaaagacccaagcagcctatctctccatctctgcaaaacaaaaacaaaaatgaaaacaaaacaagtcttgccttttagatttatatggcatgactggtcattactaagataactctgctaaataaaaaatcctgtgctggttctggactccagcacacatataatacaggcctctgccaggcctggtagctgctgtctgcaacctcaccccaggatataagaacttcccttccaggggctatgaaagctctttctctggctgtggggtgtaggtcttattcttaagtccttcactagcctagttgaccctgagggctcatgggtttggataggttgtttagcatttttcaaacttccaaagcccatggatgaccataaaatcaaaatggactttattgtagataaaaaggaaagaggagaataaaaatcattcaactgtattttttttttttttttgaggcagggtctcattctgttgcccagactggattgcagtggcatgatctcagctcatcgcaacctctgcctcttgggctcaagcaatcctcccacctcagcctcccaagtagctagaactacaggcatgtgccatcatgcctggctcatttttgtatttctgtagagacagggttttgccatgttgcccagtctggtcttgaactcctgagctcaagtgatcctcctgcctcagcctcccaaagtgttgggattacaggcataagccactgtgcccggtctcaattttattttattgaaccatatgaaattgccactcctgtttttacaaaatggtcgaatatcagcaaactcatatggctcaacctaattaaatacgtattttcctgatttgcacaaattatcaattcaaacacaaagttgtgaagcaatgtcttatttaaaaattaagcattaaacatgcgaattgagaagattaaatgactgatttcactacgggtggactagactgggacacaatattttgtcttccatcataagaaaaactggccagtatggtgaaaccccgtctctactaaaaaatacaaaaaattagccaggcgtggtggcgcgtgcctgtaatcccagctactcaggaggcggaggcaagagaatcgcttgaacccgggaggcggaggttgcagtaagccgagatcgcgccactgcactccagcctgggtgacacagcgagactccatctcaaaaaaaaaaaaaaaaaggaaagaaagaaaaaaagaaaagcccacgttattgaaagcattttttagaaattgggttgccaaaaataagctagcactgaagcacagagacattaagagaaactcaaacttttcccgagaggtctttctgtatttcagcactacaggtgtgggcagacagaacagctcatccagaaagaatccaaactgaaaacctaactttcaaatcacacccacatgttaagctggtgcagcagcctccccagatacaaggaaaatgacccttctctgcatggcactcagtggtgtaaagacactcggactcttaagcttatagaagacagagctttctagtgggctgaaaatacttaatgttccattgtttgccctctgattcctcaggtggccactgaaatctcatgcattcgtcggctcaaagtttggaattctacctagtcttgagactactatcttgtatttctttgcagtaatttttttgcattgagatttctttccctctgaattctagcctggtgccttgtaggtttcttgctgccttccctttcccagataatagcatcctacaaaatttggtgttatttctaaacccagagtagatacttcagtcctagtgattatttccctaggctgtcagctcatatggtagccctcaaaagttgaatgctggccaggtgcagtggctcacacctgtaatcccagcactttgggaggccaagggaggtggatcacgaggtcaggagtttgacaccagcctgggcaacatggtgaaaccccatctctaccaaaaatacaaaaaattagctgggcatggtggtgggcacctgtaatcccagctaatcaggaggctgaggcaggagaatcacttgaacccgtgaggcagaggttgcagtgagccaagaccacgccactgcactccagcctgggtgacagagtgaaacaccatctcaacaaaaaaaaaaagttgaatgctttttgcagtgataccatcatcagtttctaaatacctcctttcctcagattaatcaaaaaataagagtataacactatttgcctttggttttaaacatttcataactacttctttatggatatagccagagaaggaactataattcttcgttccatgttgaaatgttcgtggatgtattttcaaatcttcagtctagaaaaaacacaggcagcataaagtcaggaatcctgatatgaggttgcagtcaagcagacttcgttgccagagcctccaaattgctttttcatgttttctgtcccatttaacaccaagtttcccataatccttggagttccgatctcaattgccttccttctctttaacttgataattctatggtcagcttgacttgcactgctgtgtactgagatgcagcctctcatgggaggaatccccccacccagcacctgcctcgccttgttcagatactgcaggtgaatgaattaggagaccattaaagcatgctatttttttttgtttgtttaactctgaaacagcgcactactatgtgaaaaaagtgggaataggtctacgtttgtctgaatttagagacacttttgcctcaccatctgcattgtgagttaaattttaagtgttacaatagcttcagaccccaataaaatagaagagttagttcaatctagtcactgccccacctccaacaacactagggcttgcagctgtcctcaccccatcgggagcctaccccatcgcgccagggcttggggggaaagtcaagcattatcttccaggggaaacactaggcgggtgccccggctcgaaaccttctggtctcccattcccaggtctcgctccagcacttcctccgagctgctcttcgttctccggctgccctccagactcgtggaggcggtgtgcgaacttgaggagccatttgcagtcactgtgctgtccccgtaggtcaatgtcaggtcgccttcggtcaggatgaaatcagagtcttcctctctcagtggctcttggttctgaaaagtgcaaccaacaacaacaacaaaaatgagagactgatatcttccaggtttggcaccaaccccaatcccaatcccaactcctcatctgaaaactggggactatgaaacttgcctgccttgagcctctagcgtggtaactggatgtaaactgtagagggccgggcacggttgccaggactaggacttagaatactagaaaacagtttctaatttcaatgtctgacagcttggggttagtgaaaaagggaagaaagggagaccagcctggatttccagcttcccaatcaacacacaaagcaaggccagagtagggtaattgggcaaacgttgcaaataggtttcaggtactgtcttctctgggtaggcattccgggtgggtctcctgccctatacaaaccgtctccaacccgtcttgtttacattggaactactctttgtcatagacagcaattcagggaagaggacaagccataatcaggatttcctccctgtttcccctgtcatctccccacaggaaaaccctgataggaagcccacccgccacatcctcaggtggatgaatcaaatgatcgagggagagcaaagttgcaaccacttgaactatcagatggtagcgagagtgtcggagacggcacgaggtcagacaggaccttcttcctccaatagatttaaccaacaaaacaaggggagggccacaacccagctcccgcgctgcactgaggcctattgagtactgtgcactgccttctagaagggcaaacacagtgtcaaatacgctgggtaaactgattttttctctcctgtttcccaccgacccttcaaagctcatctgaagtcctgcatcctcttatgagacagagcctccagggcgccgaactggcctctctgaccccctcagggcccccgcgcagtcacactgcccaaggccatgggcagattccccgagatcagccccatctagatgacaaacgccaaagggcagtgacctccttctccacaccttggcaccttcctcaatggtgcttacctcacagtaggtgctaagtgaatgccaggtaaatgcaccagctagggaagactcatgggttgcgtttcctctcccagacttatttctgtgcactcactggcaacaatcacatacttgtt

SEQ ID NO: 97393 - DNA, 15862 bp, Homo sapiens
gttgcaatgagctgtgatcgtgccactggactccagcctgggtgacagagcaagaccctgtctcaaaaaaaaaaaaaaaattaaagataaaagaaaaggtggggcacagtggctcatgcctataatcccagcactttgggaggctgaggctggcggatcacttaaggtcaggagtttgaggccagcttggccaacatggtgaaactctgtctcattagtaataagaatacaaatattagccaggcgtggtggcccacgcctttaatcccagctgctcgggaagttaaggcaggagaattgcctgaacctgggaggctgaggctgcagtgagctgagatcgtgccactgcactccagcctgggcaacagagtgagactcgaaagaagatagaaagaaaagaaagaaagaaaaagaaagaaagagagaaagagggaagggtgggggaggggaggggggagagagagagagagagagagcgagcaggcaggcaggcaggcagggcgcggtggctcacgcctgtaatcccagcactttgggaggccgaggcaggcagatcacgaggtcagaagatcgagaccatcctggctaacacggtgaaaccccgtctctactaaaaatacaaaacaattagccaggtgtggtggcgggcgcctgtagtcccagctactggggaggctgaggcaggagaatggcatgaacccgggaggcggagcttgcagtgagccgagattgcaccaccgcactccagcctgggcaacagagtgagactctgtctaaaaaagaaaagaaaagaaaagaaaagaaaaaagaagccaacaggcaaacttgggagggcctttattcttcttggcagggaaaattgagattagtgaaattcagtcatgctttcttgtttcttttagacttcaacactatcccaggacttcccatcagcaaagtagatgcttttgttctacaacaatggggcaaggtccccctacccacaggaacatgaagaaaatcccaaagtcttggaagggtttaaagatctcaagaggctcagtttctgtcttagtttgccttgtgacttgacactttctttaattcagaaaataatttatattaataatgtacagtacatagtctggcagggaggttacttatgttgctgaaggatacagtaaatctcataaagcggaaatgaaacaggagaaactgtaaaactagtttggctttcacccctgtactcaaactatagtaccattttactgaaactataatactaaatatgttatttgaggaatattacttcatttgggcctagtacttaactactctatagcagcagagactggacaattatgtgccaaggttcttgaactatatttaaaagcttaaaaaggccagggatggtggctcagacctgtaatcccagcactttgggaggctgaggtaggtgtatcacttgagcctaggagttggagaccagtctgggtaacatggtgaaaccctgtctctacaaaaaatacaaaacaggctggaggcagtggctcacgcctgttatcccagcactttgggaagctgaggcaggcagatcacttgaggtcaggagtttgagaccagcctggccaacatggcaaaaccccatctctactaaaactatagaaattaactgggtgttgtggtgcacacctgtaatcccagctacttgggagactgaggcagaagaatcccttgaacccagcaggcggaggttgcaatgaaccaagatcacaccattgcactccagcctggacaacagagtgagactccatctcaaaaaaaaaaaaaaagaaaagaaaagaaaaaacaaacaacaaataaacaaacaaaaatattagctggccatcatagtacatgcctgtagtcccagccacttgggaggctgaggcaggaggatcacttgagtacaggagtttgagcctgcagtgagtcatgatcctgccacttcactccagcctgggcagagcaagaacctcactcaggaagatataataaaataaaagcttaaataatttgaaacgaagggaagggcctcaactctatcctaaatacaacagaagactcaccaactttatactggacacaagtgcagtagagtttggtatgcggtaagtgatgagaaaatagttatagattgataaattacagaggtttcatttttaatgtattattgtctgttttctcttttttttgatgcaaagtctcactgtgtcactcaggctggagtgtagtggcatcatcaaggctcaccacaaccttgaactcccaggctcaaactatcttcctgcctcagcctcccaagtagctgggactacaggcacatgcgaccatgcctggctaattttttaaaaattttttgtagagatgaggtctcactacattgtccagactggtctccaactcctgggctcaagcaatcctcccaccttggcctctcaaaatgctgggattacaggcgtgagccatggtgcccagcctgttttctctttttatgtccctctttaccactgtgatacatactacagggctctagcaagaactaatatctattctttcgttagggcagttttaattctttcatactcctctcatcaagaggtgaggtgtatgtttcccccacttgaatcctggtgggttcagagcctggcttgaccaataaaattcaatggaagtgatgtcatataatttctgaggttaagtcataaaaagtctcgcagcttcctctgtgatctctaagaattaccttgcccttggagccttgagctaccctataagaagtccaactaaccagaggctgacttgctgaataggccacaggaagatcctttctggaaggcaatcccatctgatcatgtcattccaccattccagcctaggagctgaacatacgagtgaagatgccatgtgggaactgaatcctccagccagaactgttcaaacttcttcagtccctagttgtttgagtcatccctaaatattccagtcatccagctgaggccctggccttgtagaacagagaagagttgcccccctaactgctgtgccctttctgtattctggacccatggactctcaggaacctaacaaaatggttgttttacatcagtaagttttggggtagtttgttgtgcagcaataggtaagtggaacacctctcagaatctgtgtgttttagttggggagatagctgcccagctagatactgcatttcccagcctcctcacttacgggtgaacgtggctgtaagtcctgtgtagggtatgtgaatggaagatgcaatttccaagtcatatcaataaaatgttaagtgctcattctccgcttgcattccctcaccgcttctttctggcacaccgacctggggtacacagatattaaggacggctgtcacagattggattccctaggaagcagactcagagcagtttagcatgcagaatatttattaaggcgttccctgggagtcaacacctatgtaagggaggggacaaaagcaagagcgggcaaaaggaaaagttgagctgcaatgcagattcaatggcagcctcagccaaccccacagagaggtcaggagctaaagtggtccttcagaattgtccctcattgggctgagatggctagacctttatacctccacatgtatcagtcattggatgggggtcatcctggcatatgcttttgcaaagttataatcaggatatattagtcatctattattgcataacaaaataatccaaaacttagtgactaaaaacatgcatttattatctcacagttgctgtgtgctagaaatccagaagcatgaggttgggtgcttctgactgaagatatttcaggttgcagttaagctgtcagctggggcagcagtcatctcaactctattgaggccaaaggattcagctcactcacgtggttgctggtaggccccttccttaccacaggatgcccctctgagcatgagagtattcctcaagaccaaggaggaagctgcctatgggacctcagaacatggaaggtggtgatcaagcgtgggagaaccatagagaacccaaaaacgaaacccaagaagaattaggttttaaaacctaatctcagtagaattaggttttaaaacctaatctcagtagaattaggttttaaaacctaatctcagtagcgacatccttattcattagaagtaagttcagcccacactcaagggtagcggattacccaaggtcatcccaggaggcagggatcattgaggccattttagagtcttcctaccacacataccatgcataagattttgtatacttatatttttacttttttttttttgagatagagtctcactctgtcatctaggcgagagtgcagtggtgcgatcttggctcactgcaacctccgcctcctgggttcaagtgattctgctgtctcagcctcctgagtagctagaattacaggcgtgtgccaccatgctcagctaatttttgtatttttttgttttgttttgttttgttttttgagagagtctcactctgtcatccaggctggagtgcagtggtgtgatctcggctcactgcaacctccatctcctgggttcaagcaattctcctgcctcagcctcctgagtagttgggactacaggcgcatgccaccatgcccggctaattttttgtatttttagtagagacagagtttcaccatgttggctatggctggtctcaaactcctgacctcaggtgacccacctgcctcggcctcccaaagtgctgggattacaggcgtgagccaccgtgcctggactactttttatcaacattttgttttcctacagattcttcatttaaacaattttttttttgagatggaatttcgctcttgttgcccaggctggagtgcaatggtgtgatctcagctcaccgcaacctccacctcccaggttcaagcgtttctcctgcctcagtctcctaagtagctgggattacaggcatgcaccaccacatctggctaattttgtatttttagtagagatggggtttctccatgttggtcaggctggtcccaaactcttgacctcaggtgatctgcccgccttggcctttgggattacaggcgtgagctaccgcacttggccacaatatgttgtttctaaaaattataaagcagtatattgtaaaatttttcaaatgtttgatcaaggtataaaattcatttccttatactataccacatgttaattgatccaggggtaatcacaattaagtttttattgtatctgctgagatactttccatacacacgtaagcatatacatatatacacacacacacattattgtacacttaatttatgtccttaatacattctgaagcactttccatatcagcacgttgagatctagctcattggtttaaacatctgcatgtttcattttatgattatacaaaaaaatttttcagcagttccctattgatggatatttacatatttttgttttgtctgacatgacaaacattgcaaatgtacatcctttgtctcatgatgaatcatgccttgagtctcactcatatctgatttagatgagactttggactttgactttaaagttgatgctggaacaagttaagactttttaggggctattgggatggaatgaatttattttgcatgtgaggacatgaatctggggagcccaaggtgtggaatgctatgttttgaatgtgttgtctccacaattcatgtgttggaaacttaatcccaatgcaacagggttgggaggcggagccttctgggagatgattaggtcacaaggactctggcctcatatttgattgatgccattataaaaagggtttgcgggagcatgttagctctcccttgcccttccatcttctgccatgggaggacagcaagaaggcccttcccagatgctggcacctgatcatggtcttcctggcctccagaattgtaagaagtaaattttttttttttttaacgaagaagtgagtattttattattttgctgtacagctgttgcttcactatataaaaacagcaccagcaaatgcagtgtattgcaaaattaagatagtgttgttcttcatctgacactgtacaagcaacaaaaacttcttcactcccagttatttccaatggaaagatcattaagtatttcatcccaartccaggtatggacatacacaagttacaatattatataaggcttaagaataacaacattatctttgaattatgtaatttttgtaactaatttttaccatggataatttcatggataatttcatgaatactagagcctagtctaaaaatcataggatgttgtgaaaaagacacatattatgtttatctacaatcattasaaagttaaaaggcatcttctttcattagcagtgttaacagtagtttttttttcccatgggtaatgctaaaagttgctattctaagtcttctatccaccactaatttaggacaactctgctgggttgcgttatttcatactagcttatttagtggttccattttcactcctcaatagattttatgtatttctcatatgcttcttcactcataagttcatctagttatgaagggttactcagtgtcatcttgatcagccaaccatcttcataacgagatttgtttacaagtcctggattttctgcaagagcttcattaatttcggttacttctcctgataaaggagaatagagttcactagcagctttcacactctccaaagcaccaaactcatcttgtttgttcaattttgtcccaacttcaggcagattacagtaaccagacggcgcccatcccaagctgccagggcctcgataggcagggcgcggcaggtgccaggaccacgtgcaggctgcagagcacggcccgcacgctccgcaccactcgcagcgccatgttcccaggggtgcggggatggcagcgctacgcctcagccactcgcgcggggaggcggggcggtgtgggcagaagtaaatttctttataaattacccagtctgggcctggtgtgttggctcacatgtgtaattccagaactttgggaggtcaaggtgggaggagcgcctgggcccaggggttcaagacgagcctgggcaacatagtgagacctgtctctataaaatatttttaaaaattagctgggcgcggtggcttacgcctgtaatcccagcactttgggaggccgaggtgggcagatcatgaggtcaggagtttgagaccagcctgaccaacatggtgaaaccccgtctctactaaaaatacaaaaattagctgggcatggtggcgcacacctgtaatcctagctagatcctagtagattgaggcaggaaaactgaacccgggaggtggaggttgcagtgagctgagattgtgccactgcacttcagcctgggcgacaaactgagactccgtctcagaaaaaaaaaataaataaataaaaattagtggggcatggtggctcacacctgtagttccagctgttcaggaggctgaggcaggaggattgcttgatccagggaggttgaggctgcagtgaactgtgatcatgccactgaaccccagcctgggtgacagagttgcctcaatcagtcaatcaatcaacccatcacccagtctgtgatattctgttttaacagcagaaacaaagacaactagacatgcccactgtgttatgtacttacctctattagaatatgttatgtcattactataattgatgcctacatatctcttttagtatactgttagcttcttgaggacattagttaaattgtatttctctttgtagtcttgggtaatgtacttgacacacagtagatactctgcaaaaaaattttgtttttctttttgagatggggtctcgctttgtcgcccatgctagagcgcagtggcgcgatctgggatcactgcaacctccgcctcccaggtttaagcaattctctgactcagcctccagagtagctgggattacaggtgtcttgccaccatgcccggctaatttttgtatttttagtagagatggggtttcactatcttggccaggctggtcttgaactcctggccttatgagagccaccgcacccagctgatactctgcaaatgtttaatagatgttggagctgaatttcaggctttgtaatgtcacagaaccaggcatcagaagagctgatccaaacccaagatctgcccctaacttgcctcttattctttctggcctcyatttccacaattataaaatgcaggtataatactaaaatttttttttgtatagtcctttacagatccaaaattatgattttaagaaggaaattaataagttattcatctcagtatctctttaggtgccaatactgtaaattaatcaccagtctcagatcatatatttgccatttccaacatatgcttttagtccagtctaatcaccagtctcagactatacattgccattttcaacatatgcttttagtgagttatttaaaaatattaagatatcagatgttttgagtatcagcaataggtaagtcaatctctaaacattttcagtagtgaaaaacacaaaaaacactttaagcagagggtatttggttttgagatccttgttctcttaaaatctgtgatctgaaatctagtcagttttctcattaacatccttgtcccttgggataaattaaatcagcaaactaaagtgctatgtaactattaaaatattttaaaatattggttatttaaaacttattaggggccgggtacagtggctcatgcctgtaatcccagcactttgggaggctgaggcaggtggatcacttgaactcaggagtttaagaccagcctgggtaacatggcgaaacctcgtctctacaaaaaatacaaaaattagccaggtgtggtggcgtgtgcctgtagtcccagccacttgggagactgaagtgggaggatggcttgagcccaggagatggaggtwgcagtgtgctgagatcatgccatgcaytgcactccagtctgggtaacagagccagaawcttattagggaattctgacatcttcatctttttataaaagatggccaggctgggtgcgctggctcacatctggaatcccagcactttgggaggctgaggcgggtgaatcacctgaggtcaggggttcaagaccagcctgaccaatatggtgaaacctcatctctactaaaaatacaaaaattgactgggcacrgatagctcacgcctgtaatcccagcactctgggaggttgaggcgggtggatcacctgaggtcaggagtttgagaccatcctgcccaacatggtgaaaccccgcctctactaaaaacacaaaaattagctgggcgtggtggtgtgctcctgtagtcccagctactcaggaggctgaggcaggaggatcgcttgaacccaggaggtggaggttgcagtgagctgagattgcgccactgcactccagactggcaatacagtgagactcaatctaagataaaacaaagaaacaaaaaggaatgcacttcttaataagctggagattattttaggcatggctttccctcatagtctatgaaattttcctacaatgatcatcctcagttagcacatggggcatttagtatatgtcaggaaacaggcctaaggtttttacaagctttctgatgtaatcatcaaaacaattctatgaggctggaagtaggtacaattttacaatttttatcctcattttacagatgaagaaatactcttaaagaaaatgttaatgtcaacaacaaacaataaattggtactgggtattgtcaaatatattttttaatttttactttttttcagacagagtctcactctgtcacccaggctggagtgcaacggtgcaatcttgactcactgcaacctccgtctcctgggtttaagtgattctcctgcctcagcctcctgagtgagtagctgggattacaggcatatgccaccatgcctggctaattttgtatttttagtagagacagagtttcaccatgtcggacaggctggtctcgaaaactcctgacctcaggtgatccgcctgcctcggcctcccaaagtgctgggattacaggcttgagctactgtgccaggccaagtatatttttaattaatgtattcattataatacaatttactacaaatttgaggggggaggctttccatatggaattcaagatatttttggatatatattcaacttttttttttaagagttgggggtcttgttatgttgctgatatggtttggatggctgtcacttccaaatctcatgttgaaatgtaacccccaatgctggaggtagggcctcgtgggaggtatagaatcatggggcaaatccttcatgaatggcttggcaccatcaccttggtgatgagtgagatcttagttcatgtgaaatttggttgtttagagtctgggacctcctcctctctcttgctccctctctcaccatgtgatatgctcgctcccattttgccttctaccatgattgtaagcttcctgaggccctcatcagaagcagctgctggtgccatgctttgtgtacagcctgcagaaactgtaagccaattaaatctctcttttgcaagaattacccaatctcagatattcctttacagtaatgcaaacagattaaaacagattagtactgacagtggggcactgctatacatattggaaaatgtagaaacagctttggaactgggtaacaggcagaggttggaagaatctggagggctcagaagacagaaagatgagggaaagtttggaacttagagactagttaagtggttgtgaccaaaatgctgatagacatatggtgaagtccagagtgatgaggtctcagatggaaatgaggaagttattgggaacaggaataaaggtacatctatgtcatgctttagcaaatagcttgggtgcattgtgtccaggccctaggaatctgtggaagtttgaacttaagagtgatgacttagggtatcagggtatctggcagaagaaatttctaagcagcaaagcattcaagatgtggcctggctgatgctagcagcctacaatcagatatggaagcaaagaaataacttaaagttggaacatatttaaaagggaagcagagcgtagaagtttggaaaattcacagactagtcatgtggcagagaaggaaaaagcactttgaggagaggaatacaagcaggctgcaggaatacagttgtccatgctggactcaactcatttgctcaagcaatccttgtgcctcagcctcccaagtagctggggctatagcttgtgccatcatgctcagctattcaccttacattgctgtccaaaatgttttcatttgaggcaacctgggatagtaaaagtacttctaattaaacactcctgccattagtatctagctgtgtagccataaataagttatttgatatttcttgagtctcaattaatacctactattagcagagattttgtgaagaatagtcttaatgtatttaaagctttaatggcacttatttagaaggtcctcaggaaatggtattattattccaaggtctttctagattgccttattcacctaaagagacttgatcttgagcctttgtagattttctcattggtgattccttcactgcttagaatgtcatgattccaccagacaggttactctcatctacgtgtatttttcttacatctttttcagtctatttttctctagcaattatcttcaatgtttatgcttacaataaccttagtatttggcattacgacactaatatgtgcccatgagacagacggagcactacttatcccagaggaggtattatttatttatttatttattttttgagagggaggcttgtttcttcacccaggctgcagtgcaatggtgtgatctcggcttaccgcgacctccgccttgactctcagttcaagcgattttcctgcttcagcctccccagtagctgggattacagccatgtgccaccatgcctggctaatttttgtatttttagtagagacagggtttcaccacgttggccaggctggtctcaaactcctgacctcaatgatccgcccgcctcagcctgccaaagtgctgggattacaggtgtgagccaccgcgcccggtccagacaaggtattttttagagattatgattgttcaccacaagctgcctagcaggtagcccaaggatcctggatcaacttagctatatagcatcttttctatctgaatgcagtattctcttacccacaaccatatgaagtctacacatattcattaacagtattatataaaatacaaaattgggactatgtcccctcaagatgagcacagtgctaagaggtaagagatgggaagtttgtattaagttcaaacacttttggcaagaatttatacaatttcaggtaactgggcattttaggcaaagcacacaacttcatgatgtatcactgaggaggataagataaacagttctaaaagctggtacaggtgacaaattttgtgcaattttaagttttacatttttttgtacaaataggatcttgctatgcagtccaggctggtcttgaactcctggcctcaactgatcttcctgccttgaacccccaaaatgctgggcttacaggtgtgagccactgcacctgctgtttttaaagatattgtaacatactattattctaaaaccttatcctttgttgtatcagaaaaacgacatcctagactgggcgcggtggctcacgcctgtaatcccagcactttgggaggccaaggcaggtagatcacctgaggttaggagttcaagaccagcctggccaaattggtgaaaccctgtctctactaaaaatacaaaaattagccaggtgtggtggcgtgcgcttgtaatcccagctaccggggaggctgaggcaggagaatcgcttgaatcagggaggtggtgattgcagtgagccaagatcatgccactgcattccagccttgggtgacagagtaagactccatctcaaaaaaaaaaaaaaaaacaaagggaaaaagggcatcctatacttgggctgagtctttagtgaaagcagaaaagaataaggattacaaaacaaataaattgtgaacatagttttgtttgtttgtttgaaacaaagtcttgctctgttgcccaggctggaatgcagtggcgcaatcacggctcactgcagcctcaacctcctgggtcaggtgatcctcccacctcagccttccgagtagctgggactataggtgtacaccaccacacccagctaatttttgtattttttgtagagatggggtttcaccatgttgcccagactggtctccaactgcctgggctcaagcgatccacccaccttggccccccaagtgttgggattacaggtgtaagccaccacacccaaccttagattaaaaaaaaaaattatctatttttaattatctcctaattgtaaaatttttacttccttttttatttttttaaattctcagtgatccttattctgattccttttggttttgacaattaaaaattatgaaagctggttgttttgtctcctattgctgaaataatttagttgatttaacactacagatggtgttaggataatgaatacagaacatcaatgagaatctaaattatatctcttgagacctccctcattccaagggaggtctcataagtatacatgcatacatgtataacttataaaaaaaaaaaagccacataaatcaccatgacattatagaagcagattcaagagaaaatagaaaaatgtgttcaccattaaactcaatactaatttttagaagtaacaacctatagaatcaacattaatgagacgaaataatatgttgcagttaagaacaacaggctttggagtaaataagaagtaggtttgagttggtgacttttgctgtgtggccttgggcaagctatttaatatacctaggcttcagtcttcatcagtaaaatgagataatactactatctcacagggttgtagcaagaacaaaagaagataatgcatgtaaaaccagagtgcttagcacatataataaagctaaattatcattagccattgttactatgattattattaattataattatcctagatacatatctgagcatgattatgtatttttcctatttacccagcttgacaaggtgcttaaatcttttctttagcactagaaaaaagtaggttttaattgaacctcttttcatttcatccattttacagacaaattatttatgaagataagccaacaactcataatttaaggatctctttatgttcgtcacaaaggttatcaatgcttttaagagcatctgcatagttttgttatttaacctttacacacaatacatgtttttcaaactgcaaagttgataactaatatcattttcaaataggcatagtataaccttaaatattacatgattcaaattattattatttttttttacaaagaaataaacctgtaaaggatcactgcactacagttgtccattaattatctgcggcaaaactgggatcctagtagaagcttcagcatatggatggttcctctactgcctgggcaccctctgtgacagctttgacacatttggccattgtctgtgaggctctgctaattgaatctgaaagatattaagaaaatgtcattttgataatacaactttttaaaaagcacatactaaaactttaatggtgcacatattcaggaggaaaaaagattataaggccctatgcaagtatatataattatatgtaaccaacagattccaacgataaaccccttactggccaaatgctttcaataactatccctggaaacaatcaaataactatagagcagctagacagtgcaccagtatgcagccattaaaaaattatagaaaagtattaaaaacataggaaaggccaggcgcggtggctcacacctgtaatcccagcactttgggaggccgaggcaggtggatcacgaggtcaggagattgagaccatcctggctaacacagtgaaaccccatctctactaaaaatacaaaaaattagccaggtgttgtggcatatgcctgtagtcccagctactcgggagtctgaggcaggagaatcgtgtgaacctaggaggcggagcttgcagtgagccgagatcacaccactgcaatctagcctgggcgacagagcaagactcttgtctcaaaaaaataaataaataaataaatataggaaaaatgtgtacaatactattattgaaaaaggttacaaaacagcatatgtactaaaatacattgaattgtccacttcatgagtaaattttagggtacatgaattatatttcaataaagctatcaacccccaagtgaataatctcacttttttttttttaaagagaccagatctgactatgttgcccaggctggtctgaaactcctggattcaagccatctgcccccctcagcctcccaaaatgctggaattacaggcatgagccactgcaccaggcctaatctcaccttctgtttcactaaaaaatatataggccaggggtggtggctcacatctgtagtcccagcactttgggaggctgaggtgggtggactgcttgagtccaggagtttgagatctgcctgggtaacatggcgaaaccccatctctacaaaaaatacaaaaattagctggatgtggtggtatgcgcctatagtcctagctaccgaggaggctgaggtgggaggatcacttcagctcaggaggcagaggttgcagcaagccaagattgtgcca

SEQ ID NO: 97394 - DNA, 29490 bp, Homo sapiens
accaaaatgagataccactttatgctcactaggatggctataataaaaaagacagagttgggcgtggtggctcatacctgtaatcccagcactttgggaggccaaggcaggcaaatcacttgaagccaggagttcgagagcagtctggccaacacggtgaaaccccatctctactaaaaatataaaaattaggccggatgcggtggctcatgtctgtaatcccagcactttgggaagcagaggagggcgaatcccgaggtcaggagttcgagaccagcctgactaacatggtgaaaccccgtctctactaaaaatataaaaattagctgggcatgatggtgtgtgcctgtaatcccagctacttgggaggctgaggcaggagaattgcttgaacccaagaggtggatgttgcagtgagccgagatcgtgccattgcactccagcctgggtgacagagtgagactccatctcaaaaaaatgaaaataaaaaaataaaaattagccggctatagtgacatgcgcctataactccagctattctggaggctgaggcaggataattgcttgaaccctggaggtggaggttgcagcgtgccgagaatgtgccactgcactccagcctgggggacagagggagactctgtccaaaaagatactcaaaaaaaaaaaaaaaaaaaaaaggcagatgataacaagtggtgatgaggatgtggagaaataggaacccctaatagactgctggcgggaatgtaaaatggtgcagccactttggaaaaaagtttgacagttcctcaaaaagttagacatacaggataggcacagtggcacatgcctataatcccagcactgtgagactgaggtgggaggatcacttgagcccaggagttggaaccagcctggttaacattatgggaccccatttcttaaaaaaaaaaaaaaaaaaggtgggggggccaggtgcagtggctcacgcctgtaatatcagcactttgggaggctgaggcaggtggatcacttgaggtcaggagttcaagaccatcctggcaaacacggtgaaaccctgtttctactaaaaatacaaaaattagctgggtgttgtggcacacgcctgtagtcccagctacttgggaggctgaagcaggagaattgcttgaacctgggaggtggagtttgcagtgagccgagcttgcaccactgcactccagcctgggaaacagagcaagaccctgtcttaaaaaacagataaacaagcaaacaaacttagacaaagagttaccaaatgatccagaaattctaccccccaaaatatacccaagaaaataaaaatatatatccacgcaaaaacttgtacataaatgttcatagcagcattagtcgtaatagccaaaagtagaaacaagtatccatcaactgatgaatggataaataaaatgtggtatatccatataaaagaatattatttggcaaccgaaaaagaagtattagtgctacagttcttttagaatttgtctagcagggccaggcgcggtggctcacgcctgtaatcccagcactttgggaggccgaggcgggttgatcacgaggtcaggagttcaagaccaccctggccaagatggtgaaaccccatctccactaaaaatacaaaaaattagccgggtgcagtggcaggtgcctgtaatcccaactactcaggaggctgaggcaggagaatcatttgaactcggtgggcagaggttgcagtgagccaagatcgtgccactgcacttcagcctgggtgacagagtgagactccatctcaaaaaaaaaaaaaaaaaaaaaaaaagaatttgtttagcaggttttctggtcttcactggaaagcccctttaaaaaaattaaaataaaagtattgatatatactatcacatagattaaccatgaaaatgttatgctaagttaaaggagccagtaacaagagatatatactgtatgagtccaattatatgaaatatccagaaaaggcagtccataagagacaaagtttattttatttatttatttatttttgaggaaaaaaaataaaacctgccaccacgcccaggtaattttttttttttttttttttttttttgcgatggagtcttgctctgttgcccaggctggagtgcagtggcgtgatctcggctcactgcaagctccgcctcccgggttcacgccattctcctgcctcagcctcccgattagctgggactactggtgcccaccactgcgcctgactaattttttgtatttttagtagagaaggggtttcaccatgttggccaggttggtctcaaactcctgacctcagatgatccacctgcttcagcctcccaaagtgctgggattacaggtgtgagccaccgcacctggcagacaaagtttattagtggttgcctagggcttgtggagaatcgggggatggcagtatatgggaagtgactgctaatgggtatagaatatctttttggagtaatgaaaatgttctaaaattgatttgtggtgtttgttatacacacctgtgaatataccaaaaaccactgaattgtacattttatttattttttgagacagagtcttgctctgttgcccaggctagagtgcagtggcgcgatctcggctcactgcaacctccgcctcctgggttcaagtgattctcttgcctcagcctccctagtagctgggattacaggcatgtgccaccatgcccggcttcttttgtattttttagtagagagagggtttctccatgttggttcggctggtcttgaactcccaaccccaggtgatccacccaccttggcctcccagagtgctgggtttacaggcgtgagccactgcgcccggctgaattgtacattttaaatgggtgattttgtgatatgtgatttaatctcaataaagttgttaaaaattagttttgaaaagttcacactggctgttgagaatgggttgtaccgggcaaaaggagaaacacaaaaatgttaatggggctagaaaggtggtgacaaaagagagagaagcaggtgaattagagagatactttgaaaagtcaacaggacttgccaatgggttggacctggagaatgagggagagggaggaatgacttctgagttgagggaaagtaaacccaagaaatgatacacgatcaataaatcccagtatccaagaagtactctgtgttgtactaggattcagatccaagattcaactccttggaatgggttagggttggatttaggatattttacaacaccctcccacctagatccaacaagcttttgtggcagacccgcctgctcacagttctgctcactgaactctccccaccaccccctgcctctcttaagagaatcacttctgtagcagagttcccacagctctgcccctcagctgctttcctcttgggcctcaccccttttggactctgctcaatagcgtcttgggatctggctcagagtgtagactcctacttttctcatcactctatgagacacactttgaacctccattacctgtgaccataaatggctagagatatttccagtccttaattttaagtcaggatggggtggagtggaggttgagagcagggagagctcagaaaccagaatcctgctctagaccagcagtgctaccaagaagaataggtcccatttatcgatcaacgctgtgcgtcaagcaccttccaaatgattgctaacatttccaaatattgactttgtgccggacactcttctaagcactttatgtgtattgagtcacttaattctcacagaaatcctaggaggtattatcttcattttacagatgaaactgaaggatagaggagggacagtctcttgtctaaggatacacaagcagtacatgacggcacaaggattcaaagcaggtaatctgactcaagctcagtcctcaccaccagtttatattgctacatgtaagacctcatttcatccttctagaagtcctcagagacaggaactgtgagtaatcattcccatttcatggataaagaaactgaggcatggggattttaattaatgtacccgagttcacatagctagtaaacggcagactctccaaattggaagacagttgtggagtgaaaatatttattatttttttttttgagacggagtctcatcctgttgcccaggctggagtgcagtggcacacctcggctcactgcaacctctgcctcccaggttcaagcgattctcctgcctcggactccctagtagctgggattaaaggcgtgcaccaccatgcctggctattttttttttcttttttggaagaaaatgactttattctaattaactcacaaagaataaaatcataacagctagtttaaggaggccacacaaacatttgcccagtcccagattctacagagtaggaacaccctcccttccatttcaattctgaagcaaggaagctaggaatgacaggagaagtttaactgatgcttacactttataccctcactaccaattctatttttatactaaattaattagtatgagagctgattttccatctctccaggttgaacttcttgattaggccaatccgtttgcaagtcggcactgtttcagcacctcattgaaaccctcacagagcttgatgtcaccctggttctcggcacactccagaaactgtttgatctcacagaagcaaggctgctgctgctgtgccggctgggttccctgaggctcctggtaagtgatgtcaggcctcgcaggctcagcattacttcctccactgaagcccccagtaatggcatgacccagtatgtgccccacagcagagcccacagccacgccagctgcagtggttgccatctgggccatcagacctggctgccggggcgcagcagcagaagagccaactgtagatggcggtgccgctgctggtggctgagcgactggtgctggcctgggtgcagctctcatctgaggggcccggctggccggaggggccatgcgggaggtgtggcttcggcttccaggtatcctaggtacgcgacggctcggcctccggacgtgtgacaaccagcgaagagctaagtgacttcttccgcctggctaatttttgtatctttaatagagacgggtttcaccatgttggccaggctggtctcgaaccctgacctcaggtgatccgcctggctcagcctttcaaagtcctgggattacaggcatgagccaccaggccgaaaacatttatttctaacctttagagcacaaactctctgtctatactaattacatggggagtcaccttgctgcgctccaaaacgctcagtttcatcaccacatggtcaccagcaaagtttcgtttcttttaagtggcgtgatctcagctcactgcaacctctgcctcctgggttcaagcgattgtcctgcctcagcctccagagtagctgggattacagatgcgcgccaccacacacggctaatttttgtactttcagtagagatggggtttcgcctagttggccaagctggtctcgaactcctgacctcaagtgatcccaaagcgctgagattacaggcatgagcgaccacacgcccgaccttcacccattatttgtcaggaaatttctggccagcctaacattagcaggtgttgacgtaactaaaagcttctgtcttactttgaggaaatgctcttgcacaactgaactagcctcattgacacaattctgcaccgtttcactgcttcaccatagccagcccagacaagtctcaagcgccggtttcctttctttggtcgcaccagccaaagccaggactttgtaaaaggatacggcgcaaaccccaggaatgcctcgcctatgcgctcagagccacaactgccttcgcgaaaagctctgccaaagggcggttgcgccgcatcacgtgcctgcggcgtaatctcccactgggcagcggcgctggctcacgtgacacgtgcaggccaatgcctggcgtccgcgcatttggctcctggttgctaggcgacgccaacccgattctggttgctggagtttatcctcccgaggttgctgtgcgagtttcggactcagctcaagcgcttggatccctacagcacctgcgagggcttctcctggctgccgctttcgttctggcgaatgttcggggtggcagccccccttcgaggcttgcacgagggcgtcccggcatccgcgatcaagcgggccctgctgcttttggggctgaccctgcggctggggtgctgcggcgtcgctctggctatgcccggtccactcacggactccctgctttggcctgctcagctcaggagaaccgggcccgactccatttcgggcagtggtggacagggaaactagtgcctgcctgtagtggtcccaggcatagagcttcctgcagctaccctgtggcttagttcacgttttgttgctttgaccaccgatgagaaatgtgcagtagggaccctgtaggagtctgcttacccgaaatggtttctgtcttgaatagttgttgagtgaaaggtaacgtgtttcgattaaatatatatgtgtgtgtgtgtgtgtattcccagaagtgaaaagacttaaatattcttttttttttttttttgaaatggagtctcgctctgtcgcccaggttggagtgcagtggcgcggtctcggctcactgcaacctctgcctcccgggttctctgcctcagtctcccagtagctgggattacaggcgcccaccaccacgcctagctaattttttttttttttttttttttttttttttttttttagtagagacggggtttcaccatcttggccaggctagtcttgaactcctgacctcgtgatccacccacctcggcctcccaaagtgctggaattacaggtgtgagccactgcgcctggcctaggattttcaatctagaaacggtcgtggagtgtctgggacttgtatgtagctcgctgtttactagagggtttggtatttcacgtgtatttaatttatatttggattggattttacttacttttctaatcagcctgtgaactaaagtgaacaaacaggtttcagtgccctttgttttcagacataaggaaacatgaccggagaaattatagtcatgcattgtttaacagagatatgagaaatgcatcttaggtgaatctatcattggaatatcatagagtttttttgtttgtttgttttgtttttgagacagggtcttgctgtgtcgctcaggctgcagtgcagtggtgccatgacagctcgctgcaacctcgatctgctgtgatacttctgcctcagcctcctgagtagctgggactgcaggcctgcatcaccatgccagactaattttttaaaattaaattatatatttttgtatattttaattttctttttatagagaaagggtcttgctatgtttctcaggctggtctcgaactcctggtctcaagcaatccacctgcctcagccccccaaagtgctgggattacaggcctgagctaccatgtctagaccacagccggctaattttaattttttttgtatagacagggtttctccctctgttgcccagtctggtctccaacttctgggctcaagcagtcttcctgccttgaccttctaaagtgttggaattacaggcatgagccactgagtcctgcccatagagtgtacttacgcaaacctagatagtatagcctactgcacacctaggctatatgatacagcctactgctcctacgctacaaatctctacagcatgttactgtactgtatactgtaggcaattgtaacacaatggttggtatttttgtatctaaacatagaaagggtacactaaaaatggtacaataaaaatacaatattgtaatctgatggaaccactgtcttatatgcagtctgttgttgactaaagatcatgtgacatgtgactgtatttgctcaatgtattgcatggagagggccagtgcttctcaaatgtgtgtagtaaccacttagcaatcttttgtttttttaagacggagtctcactctgtcacccacgctggagtgcagtggtgcgatcttggctcactgcaacctctgccccccgggttcaagcaattctcctgcctcagcctcctgagtagctgggatttcaggcgcacaccaccacgcccggctaatttttgtatttttagtagagacggggtttcaccaccttggccaggctggtcttgaactcctgacctcgtgatccacccccctcggcctcccatagtgctgggattacaggcgtgagccaccgcgcccggccaggaaccttgttaaactgtatattctgattcattaggtctggagcaggtcctgagaatttctgcagttctgacaagctcccaggtgtatatgattctgctggtgtgatgcacgcctcaaatagcagtagccctaagtgacacggttaatagcacaattgcctcctttccatatctgattcttatgcccaaacaacaatttcttaatatttatgaaatttcagttacatatgaagagaaagtcataggatggaaatgacaaatagcgttgccaagatagaatttttattaaggattcattttgcttattttattacttgaaaatctgagaattcacaatattggaaataatgggcttaaaaatatcaagctggctgggtgtggtagctcgagcctgtaatcccagcacttgggaggccgaggcggggggatcacctgaggtcagcagtttgagaccagcctggccaacatggtgaaaccccatctctactaaaaatacaaaaattagccaggcatggtggtgggcgcctgtaatcccaacttctcgggaggctgaggcaggagaattgcttgaacccacgaggcggggtttgcagtgagccaagatggcaccactgcactccagcttgggccacaagagcaaaactccatctcgaaaaaaaaaaaagtatccagcgacacggtagctcacgcctgtaatcccagcactttggctggtcaaggcaggtggatcacgaggtcaggagttcaagaacagcctggccaagatggtgaaaccccatctctaataaaaacgacaaaaattagctgggcacagtggcaggcacctgtaatcctagctactcgggaggctgaggcaggagaatcgcatgaacctgggcggcagatgttgcagtgagccgagattgcgccactgaactccagcctgggcgacagagagactccatctcaaaagaaaaaaaaaaagtattaagctttttgttgttagaaagtctttaactgctgggcgttgtggctcacgccggtaatcccagcactttgggaggccaaggcaggcgaatcacctgaggtcggaagttcaagaccagcctgaccaacatggagaaaccccatctctactaaaattacaaaatgagctgggcgtggaggcacatgcctgtaatcccagctactcgggaggctgaggcaggagaatcacttgaatcccggaggtggaggttgcagtgagcggacatcatgccactgcactccagcctggacaacagagtgagactgtgtctcaaaaaaaaaaaaaaaaaaaaaagatttgttaggcaggaccagagcaatgccaactctagggctaattattcccctgaggcaagaccttcataagtactctttccaatgccccacacattacgagtttttccaatctggatcataggagtaggcactattccttctaatccaggggtcccagtctccaggccgcggactagtaccagttggtggtctgttaagagccgggccgcatagcaggaggtgagtggcaggcgagcgagcattactgcctgagttctgtctccagtcagatcagcagcagtattccattctcatagcagcacaaaccctattgtgaactgtgcacgtgagggatctaggttgcccactccttatgagaatctaacgaacgtctgatgaactgaggtggaagagtttcatcccgaaactccaaaaaggttaggaatcgctgtagtaatccttttacgtggttctttccccagccttgtgtagttttcttacatatgtatcctgaacagtactctgctgaatgctagaggcggggaccttttacagatctctggggttctgtctgaacaactctctttctctggtactctgtcctttccatctggctaccttggtctccctggactcagctctgtctcctcagctccgggattccaccaggcccttcctcactttgctcttcttgcagtagagcctggaaaccctcaaggcagtaagctggagcaataatagggctcacttcacttgtacttttttttttttgagacggagtctggcactgttgcccaggctggagtgcagtggcgcgatctcagctcactgccacctccacctccagggttcaagcgattcttctgcctcagcctcccgagtagctgggactacaggcgtgtaccaccacacccggctaatttttgtatttttagtagagacggggtttcaccatattggccagactggtctcggactcctgtcctcgtgatccgcccgcctcgggctccgaaagtgctgggattaccggcgtgagccaccgcgcccagccatttgtacttttttcagggatttctgtcctttgttgcgtgatatccggtgtcttaaagaccatttgttacattttggggatccgtattttggttgtttatgtgggaaagtaaatctagcccctgtttatcttcagttctggaagtggaagtccaaatatcacacccacctggcacacttttaccaccccaaaccattgaatatggaaactgttttaagtgaggttgtatactattgaactcatatccaattacttccaggggaagctattatcctgtcttgatatccctaacagacttaaccaatgcctggcacttggctgacattcactaaaagctggagagcatgaataaactatttttagcagacagctgttgatcagcttatggtgttttcttccaacatttgttgatgggcttttgcaattttctttttgcctgccggcagcaaaaggaagccaggcaaaatggacatttctgggacttgttactcatgattgtaattatccacaaaaacgcaccctttaaaaagctttgataggcatgaaggaacttttgggggtgatagaaatgttctaaaactgagttgtgatggttgcacaaggggacgaaaaatcattaacttgtacacttaaaaatgggtgaattttgtggtatgtaaattacacctaaaaaaaagcttttttaaaaagcttatctgaaagatttccaggcattttaaggtgaaaaaaggacacattgccaacaatttgtacaggagaaacctgtactttttccaaagtctcatatgaattaaagtacaaccttgaggccaggtgcctgtaatccccacacttttttcccagcacttttggatgctgaggtgggcagatcacttgaggccaggagttcgagaccagcctggccaacatggcaaaaccccttctctactaaaaatacaaaaattagctggctgtggtggtgggcacctgtaatcccaattactcagaaggctgaggcagaagaattgcttgaatccaggaggcggagggttgcagtgagccaagattgcaccactgccctccaggcagggcaacacagcaagactccatctcaaacaaaacaaaacaaaacaaaacaaacaaacaaccttgagcaggagtaggagcagactatggtcaacttatactttgtacaatacatatgtattaggtgtaatcaggaaaatattaaagattttaaaagaaagactaacactgagaaaaatcaaagggcaattccaagagaaaaggggcttatttgatcgaaagggaagattccatttccttctccactggctcctaatgtggtggtggtggggcgtgggggttcacaccaaaaaattctacaattctctgcagaccttaggagggtgtctgtcagtctcttgctataatggaatgcctgaggctgggtaatttatcaaaaaatgaagttaagggcttggcgcggtggctcatgcctatggtcccagcactttgggaggctaaggcaggtggatcacctgacatcaggagtttgagaccagcctggccaatatggtgaaaccccatctctactaaaaatacaaaaatattagctgggtgtggtggtgggcacctgtaatcccagctactcgggaggctgaggcaggagaattgcctgaacccggaggcagaggttgcagtgagctgagatcgtgcctctgcactccagcctggggacagagtgagactccatcccaaaaaaaaaccaaacaaacaaaaaacgaacaaacaacaacaaaatgaagttaacttggctaacaattctgctggctggaagatggagaagctggtgaaagcttcaggctgcttccactcatggcaaatggtgaaatggagccagtgtgtgcagagatctcgcagcaagagagagagagacaggggaggcgccaggctatttttagcaaycagctcttgtgggagggaaaagagtgagaactcactgaccccttccccgcaacaaggcattggttattcatgagggatctacccgcatgacccacaccctgccattaggggataaacgctcagcatgagatttgtagggaataaacatccaaactttagcagtgtcctatgatttatctcaatcctgacactatctacctggaaatagcatcagattccccaggttacaggcttagtcccttaagactgcccccacttcagacactgggtgccagtcccaggttgtcacctgtacttcttgcagactcgctataaattagaagttcccaccattccctcctctctgggtttgatcatctgctaggacagctcacagaactcagaacggtctactaaccagattgccatttattatgaaagaatataacaggaacagccagtggaagagctgcatagggcaaggaacatgggaagggatctggagcttccatgccctcctcaggcacgccaccctccccgcagctccgtatgttcaccaacctggaagctccttgaaccccattctatcaagatttgatgaaggtttcattacataagcatgagtaacgaaatgattgatcattgagcttttttttttttttttttagagacccagtctctaaaaaaaaaagaagagaacaaatactttatcaaaccatttatgttatactataggaaatgtatcatacatgctttatttgtatgagatgtctatatctgcacttcaagcattaattcttaccttccaaaagtgcttaataatgtttttctgggtttaattgcctagcacaagttggcttatatttggatttgtctaaacagcatttttctacatgtccttgacctttgtgcactttagaaccttggttttaagctacagtcctgttaatcatcaattatcaagtattcattcttactaataacttgagtcagatctatgtacccagagcatatagttcataattaataattagctcttgcatttgtctaatgcttccttcctctctaaggaccaggttgatggtgaacatcatcactggaaagtcaggaaaggttatagtccctactttgcagaggaagaaggactactcagaagcagctgacctccttgggcaaagcgaaatgccatctaaaagaatgcataggtgactggctggggcttgaaagaaatctgaatattttcttcaataaaaaattaaatgagggccgggggcggtggctcatgcctgtaatctcagcactttgggaggtcgaggcgggtggatcacgaggtcagcagttcgagaccaacctgaccaacatgtgaaaccccgtctctactaaaaatacaaaaattagccaggcatgatcgcggatgcctgtaatcccagctactcaggaggctgaggcaggagaatcgcttgaacctgggaggcagaggttgcagtgagctgagattgcaccactgcactccagcctgagtgacagagtgatactccgtctcaaaaaaaaaaaaaattaaatggtacacagatgacattatgatacccattgtataataaaactgttgagatttcaggatgaaattacattgactaaatttttttccagtgatttaggaggtgacataaactgtgtcacctgactaattgaaggagaactctgtccatttcctgaattatcttttttcctttgttagatcatcaagtagaagttttctgtgccctctcctggcttgattctgaaactgcataacattcagcctcactgggtgggtctctgagataaattcatgctctccccttcctctctcctgcccataggaggcttattttattttattttatattttattttattttattattttttgagatggagcctcactctgttgcccaggctggagtgcagtggcaccatctcggctcactgcaacgtctgcctccctggttcaagccattcttgtgcctcagcctctccagtagctgggattacaggcatgtaccaccacgcccagctaattttttttttttttttttttaagtaaagacgggtttcgccatgttgaccaggatggtctcaaactcctggcctcaagagatctgcctgtcttggcctcccaaagtgctgggattacaggtgcacaccaccccactgggctaatttttctatttttagtattgatgggggtttcaccatgttggccagactggtctcgaactcctgaccttaaatgatccacccgccttggccttcaaagtgctgggattacaggcgtgagccactgtgcctggcttttttttttttttttttttgagagggagtctcaccctgtcacccagctagagtgcagtggcgaaatgttggctcactgcaacttccacctcctaggttcaagcaattctcctgcctcagccccccaaatagctgggactacaggcatgcaccaccacacccagctaattttttgtatttttagtagaggcagggtttcaccatgttggccatgctggtctcaaactcctgacctcaaaggattggcccaactcggcctcccaaagtgctgggattacaggcttgagccaccgtgcccagctgataagtgtgtaactttataggcaaagtgaatagaatactggggattttgacaagctttaatgtcacaaagattttttttttttttttgagttagagtctcgatctgttggccaggctggagtgcagtggtgtgacctcagctcgctgcaacctccacctcccaggttcaagcaattctcctgcctcagcctccggagtagctgggattacaggcgcctaccgccatgcccagctaatttttgtatttttagtagagacagtgtttcaccatgttggccaggctggtctcgagctcctgacctcaagtgatccacccgcctcagcctcccaaagtgctcagactacaggcgtgagccaccgtgccaggccacaaagattctttgcttggccaaactttagcaccccacctggctttttggctataaattcccacttgccatgccgttgtaaaccaaatartgtctgagacaggtctcagacaagtttattttgccaaggttgaggatgtgtctgggaaagacacaagctacagtggtatctgtggcctgcgctctttcccaagaggattttgagaacttcagtatttaaacgggaaaattgggcaggaggggaaagaggacagtcaattgttcataaaattattcagaaaatccacattttacattaaataacctaaacatagagtagaggaagaagtcaaatatgcgtttgtctccaggttggcggaggtgggggtcgggggaatgatccccagtcttatctttgtcccttacttgtgaaaataagctgttaatttacattgtcaggatgagggaggtcacctggggagatatgtggcctctgtcttgcagctacctgtttaggaaccaaaaaaagtgcaatgttttacatactcagttcccaagcttaactttttcctttggcatagtgagtctggggtcccgggattttcttttcctttcacactatattgggttgagagtccagtcgctctcctcaactacaagattccattgcagtggtcactatacctatctcaagggtcctgaatatttttccttaccatgctttaacmaggatcattagatacttttatcttttttttttttttgtcagggtctcgatttgttgttcaggctgcagtgcagtggtgcaaacacagctcactgcagtctccacctcctgggatccagcaatcctcctacctcagcctcctgagtagctggactataggtgtgcgccactgtgcccagctaattaaaaaaaaawatattttttttttagagacagggtctcactatgttgcccaggctaatttttttctttttcttattctttttcttttctttttttttttttgagacagagtcttaccctgtcacccaggctggagtacagtggcgccatcttagctcacggcaacttccgcctcctggattcaagcaattctcctgcctcagcctcctgagtagctgggagtaattacatgcacacgccaccacacctggctaatttttatatttttagtagaggcagagtttctccatgttggccaggctggtctccaactcctgacctcagatgatctgcccacctcggcctcccaaagtgctgggattacaggcgtgagccaccgcgcccggccaggaaattttttcctttaacagatgaaagcattctgaacatgctaaacaatatatttttatttagggctaggggacaaagaaggtgaagatgagtgttgaggttgtagcaaggcgaatgagtgtcacagaaagcccccagccaggcagcctggggaggctggagttgcggcaggatcatttctgagcttccgcaagcacagacaagttcagcgttgacwccttctgcagagcccttacctcaccattcagcaggccaaatggaatcaatccatgcagacrgctgaaatgcacayrgtgttttccccayactcaggctgtcagttttgttgactgagatactcatcaccccagagctgcttttcacagttctagaagatctgttcaatcattcattcactcacaaaacatttattccttgtgttttacaaggtactgcccttggaggacacccaaaaggttgaagtagatattggaaattatagtttactagatgggtacttctcaaccttcttcctgtcatggcatacatagaaaatgatacaatttatatctctcactgaagttaactggggggagttyggatccctatcagatttggtgaaaaaaattgatgttttctacatattgtataattatgatttggaaaaaaatcaaattattagggaaagcattaaatattgagctaatataatacaaaaattaatacaaataaatacaaataaataataaatacaaaaattagccaggcatggtggcgcatgcttatagtcccagctactcaggaggctgaggcaggagaatcactttaactcgggaggcggaggtagaagtgagccaagatcgcaccactgacctccagcctgggcgacagagcaagactgtatcaaacaaaaaaaaaaaaaaaaaagagatggcgtctcacatctcgctgtgttgaccaggctggtcttgcactcctgggttcaaacaggtcctccctccttggtctcccaaagtgctgggattatagtcatgagtcactgtacctggccaagttttagcttttctgtgaaggtagctgtttaatatcaggttttgttttgttttgttttgtttttttgagacagagtcttgctctgtcacccaggctgcagtgcagtggcgcgatgtcagctcactgcaacttctgcctccggagttcaagcgattctcctgccttagcctcccgagtagctgggattacaggtgtgtgccactgcacctggctaaattttttttttttttttgagacagagttttactcttgttgcccaggctggagtgcaatagtgcaatctcagttcactgcaacctccacttcccaggttcaagcgattctcctgcctcagcctccctagtagctgggattacaggcatgtgccaccacgcccagctaattttgtatttttggtagagacaggatttctccatgttggtcagactggtcttgaactcctaacctcaggtaatctgcccgccttggcctcccaaagtgctaggattacaggcatgagccaccgtgcctggccaattttttgtatttttagtagagacggggtttcaccatgttagccaggctggtcttgaactcctaacctcaggtaatctgcctgccttggcctcccaaagtgctaggattataggcgtgagccaccgtgcctggaccaatatcaagttttatgcttgatatttgcgtatttgctacatggaataataatcagaacttttaaagaatgatctcttcaaattcttgatacccttgagctcaaggaggtaatacaaatcctaaaataaatgttaaattcaaaaatttacagaagttgaaattgtcttttctttcattaacaaatgtacaattgaaatttcttgtgataacatgaatggatttttattttttattttatttaattttttttttgagacagagtctcactctgtcacccaggctggagtgcagtggtgcgatctcgtctcactacaacctccacctcctgggttcaagtgattctcctgcctcagcctcctgagtaggtgggattacaggcgtgcaccaccatgcccggctaatttttgtatttttagcagagacagcatttcaccatgttggtaaggttggtctcaaactcctgaccttgtgatccgcctgccttggcctcacaaagtgctgggattacaggtgtgagccaccgcacctggccagatttttatttatttatttttatttttatttttttgagtcggagtctcgctctgtcacccaggctggagtgcaatggtgcaatcttggctcactgcaatctccgcctcccgggttcaaacaattcttctgcctcagcctcctgagtagctgggattacaggtgcctgccaccacgcccagctaatttttgtatttttagtagagatggggtttcaccatattggccagactagtctcttggtcaggctggtctcgaactcctgacctcgtgatctgcctgccttgggcctcccaaagtgctgggattacaggcgtgagccaccacgcctggcccaatctggatttttatttatttatttagagacagattttcactctgttacccaggttggagtgcagtggtgcgatcatggctcactgcagcatctctctacctcctgggctcaagcaatcctcccacctcagtctcctgagtagctaggacaagaggcatgcatcaccatgcccagctaacttttttttagattttttcgtagagataagttctcactatgttgcccaggttggtctcaaactcctggtctcaagcaatcctgccatcttggcctcccaaagtgctaggattataggcatgagccaccacacccagctaaacacatttttctttttttgagacagggtttctctctgtcgcccagctgcagtacagtggcactatctcggctcactgcaacctctgcctcccgggttcaagtgattctcgtgcctcagcctcttgagtagctgggactacaggcgcctgccaccatgccccggtaattcttgcatttttagtagagatggggttttaccatcttggccaggctggtcttgaactcctgacctcaagtgatctgccaccctcggcctcccagagtgctgggattacaggtgtgagccaccacacctagctgaaaacatttgatagattctaattctgtagtttgggatggggtccaggaatctgaattttaacagacactccaggaaatcgatgtaaatgtttctcacaaacaatactatgaaaccactgactgaagctagcagttctcagatgttttcgcttttttaaatctcaagactcctttacactattacaattattgaggccaggtgtggtggctcacacctgtaatcctaacactttgggaggccaaggtgggaggatcccttgaggagttcaagaccagcctggacaacatagtgagaccctcataattacaaaaaaaatttaaaaaatattagccagttgaggtggcatgagcctgtggtcccagctactcaggaggctgaggtgggaggatcagttgagtcctaggattcaaggctgcagtgagccacgacagtaccactgcactgcagcctgggagacagagccagaccctgtctctcaaaaaagttaaaaaaaattactgaggatctcagaaagcttttgttatgtgggatatatctgttgatatatacaggattataaattaaaacaggcacacacacaacaaagaaaaaaaggctgagcacagtggctcatacttgtattcccaacactttgagaagctgaggtagcagtattgcttgcatccaggagtttaagaccagcctgggaaacgtagtgaggcccaccatctctttttttggtttgtttttttgagacagggtctcactttgtctcccaggctggaacgaagtggtgcaatcacagctcactgcagctttacctccctgggctcaggtgatgctcccatctcagccttctgagtagctagtgagaggtgaagccggctgggcttctgggtcaggtggggacttggagaacttttctgtctagctaaaggattgtaaatgcaccaatgagcactctgtgtctagctaaaggtttgtaaacgcaccaatcagcactctgtctaaacagaccaatcagctttctgtaaaatggaccaatcagcaggatgtgggtggggccagataagggaataaaagcaggctgccggaaccagcggcaccaagctggtcggggagtcttccaaattgtggaaacgttgtttgtaaaccttgttcttctgctctttgcaatagctcttgctgctgctcactctttgggtctgtgccgccttcatgagctgtgacactcaccgtgaagttttgcagcttcgctcctaaagccagcgagaccacgaacccactgggagggacagcaactctggacgcgccacytttacgaactgtagcactcaccgcaaaggtctgcagcttcactcctgaggccagcgagaccacgaacccaccgtgaaggaacgaacaactccagacgcgccgcctttaagagctgtaacactgcaaaggtctgcagcttcactcctgaagtcagcgtagaccacgaacctagcagaaggaagaaacttcggacacatctgaacatctgaaggaacaaactccggacacactatctttaagaactgtaacaccgcgagggtctgtggcttcattcttgaagtcagcgagacaaagaacccaccaattcgatacactgggaccacaggtgtgcaccaccagtcttggctaacttttgtattctttgtagagacaggatttccccatgttggccaggctggtctcaagctcctggactcaagccatgtgcctgccttggtctcacaaagtgctaggattacgggcatgaggcaccgcacccagtgagaccctatttctacaaaaaatacaaaaattagctgggcatagttgtgtgcacctgtagtcctagctacttgggaggctgaggcagaaggattgctcaagcccagggggtggaggctgcagtgagctatgactgtaccacagcaccacagccttcatgacagagcgagacttctatctcccttaaaaaaaaaaaaagttcagggtcttttgagggtgggcttctactgaacattggacatgtggagctgagggctggggtggagcactgcaggcagacagaaaagcatgaacaaaggaaaggaggcaagaaagtgggggctgaggcagctgaccatgggctggaggaacaagcccgtggagctgcagaaggggaaacacaggaagaattggctccaggaagcattaccgggcaggcatatgtatggtgatactagtgagagtgagatcagctggaaagctggggtgggaaggcctggaccagagtaacagcagaggaaatgagcagaaggcttgggggcaggaaaccatcaggacttcttaaatttgggggcgtagagcaggatcagagacagggaggtggaaagtcgctggctgaacttgcagcccaccccaggtgctgtcaagcatccaggtcagggttagaaattggtcgcctggagctcagggctgggatttgggcttgtggttgacctgcctatgggtgaaagtcatcacctccgtattaaaagggattgccagccgagaaggagccacgaaggtggaaggagaccaggggagtcccagtcaagaggccgcctgaggaacgtttcaaggagagagggtgctcagcagtagtggatgttggggacacctcattggaacgcctggcacatagcggacactcaatatttgtgagctgaatgaaagaaaaacccggagtaagaacatgatacattcaggacaagcaacatgaaagaaatagcagttgaatttgggagtcaagagaataactgagaccctttaagtggcataagggagaaaaaaaggaaaaaataactgagagattgttgcatttgttccagaaaatggctgggacctgccccaaggccaacactaagcactgataattgaccattaggaaactctgtcccgacctgcagagtggaggctccactccagagtggaggctggagtggtgtggggtttaatgtgcaacctttttttttttttttgacagagtcttgctgtgttgcccaggctggagtgcagtggcgcgatcttggctcactgcaaactccgccctcccgggttcacgtcattctcccgcctcaggctcccgaatagctggtactacaggtgcccaccaccacgcctggctaattttttgtatttttagtagagatggggtttcaccatgttagccaagatggtctcatctcctgacctcatgatccgcccacctcggcctcccaaagtgctgggattacaggtgtgagccaccgcgcctggcctaatgtgcaacctttgtgtagaggttgcaacgtaaatgcaaatgtgagccttttccattcaatctcaacatttagagatcagaaaaaataatatatataatactgctaaatggctcacataattccattacaaatcacttctttctttccacgtgtgtttttctttccccttagaaataaagaggatgtaacaggttctctggcactgtgaccttccttacagcttgcctgtaagtcctttatttatttatttatttatttatttatttatttatttatttttgagacggagtcttgctctgttgcccaggctggagtgcagtggcctgatctcagctcactgcaagctccgcctcccgggttcatgccattctcctgcctcagcctcccaagtagctgggactacaggcacctgccaccatgcccggctaaatttttgtacttttagtagagatggggtttcaccgtgttagccaggatggtctcgatctcctgacctcgtgatccgcccgcctcagcctcccaaagtgctgggattacaggcgtgagccaccgcccctggcctctagtccttttttaacaaggttatttaaaaagactttactggccaggcgcgatggctcacgcttgtagtcccaactactcgggaggctgaggtgagacgattgcttgagcccagcagtttgaggctgcagtgagctatgattgtgccactgcactccagcctgagcaacacagcaagaccctgtctcaaaataactagctagctagctaagtagctaactaactttactgcttcttgagattcctatccctggacatttaaaaatacattatttaaaaaaatgcatttcctatttttctggcttagagaaagatcattttccttcatatctttctggctttaaaaatattactctggggtggctgctgtggctcacacctgtaatcccagcactttgggaggccaaggtgggagaatcacttgagtccagaagttggagaccagtctgggcaacacagtgagaccgtctctataaaaacaaacaattactctgaatgggagaagaggctgctgaaggccacagtggggagcagggcgcagacacccctggcacagtgccggccagtgggcacccccagcctgactctatttgccagaggctgaagtccagaggggttgaggggagagcacggcaggtcctggggcccctcccccgccttgatcctagggcgcccctgacctttgagccggctcgggttccggctctggcgcgtgcacactcgcctcgccgttcgggaccagccagatcgcggcggcctcgcgggcggtttggtcggtgaggtcttggccgcgcgcggcaatgctgaggctgctggcgtccgggtgcgcccggggcccggggcccggcgtgggcgcgcgtcctgccgcagggctctttcatccggggcgccgccagagccgccaggcttccgacgcgccccggaaccagccccccagccccgagttcgtggcccggccggtgggcgtctgctccatgatgcgcctgccggtgcagacctcccccgaggggctggacgctgccttcatcggggtgcccctggatactgggacctccaaccggcctggggcgaggtaaggccggaaggacgggggccgggtacacgtggagggactgcttgctggctgtcgggcatggaaagcaccgagacaggcgcccctgctggccccgggtcgagttggaagctggtggccggctccaaaatgccccttatggtttgagatggttgatttacctggaccctcaataagcaaaccccagggctcaacatgggcgtggcctcccacatcttagtgtcatcattggtcaagaagggattttggccggcccggtggctcatgcctgtaatcccagcactttgggaggctgaggcgggcggatcacgaggtcaggagttcgagaccatcctgaccaacatggtgaaactctgtctctacaaaggtacaaaaaaaagaaaaaaaaagccgggcatggtggcgcgggcctgtaatcccagctactcgggaggctgaggcaggagaatcgcttgaacccgggagacggaggttgcagtgagctgagattgcgccactgcgctccagcctgggcaacagagtgagactccgtctcaaaaaaagaaaaaagaagggattctggagcctgaaccttctctgtgtccccatcctggggccttgctgggatggctgctgtggattcctcccctctcctctccccagcttacagtggcaggtgacattgcatttgagagcagaaactggctgccccttccccaaatctgaagatgtcacctgactcaagaaatgctcaaatgaaggcaattttcctaggatcaagtcggaggaagcaaaattcatcttcctagttattgaacgtcagcaatttctgattcagctcagcaacactatatctgaccgtactgatctgaattatgaaagccagcacttattaaatgtctcctaagtgcaaggtgctttgcatagattacctcatttaatttttactacagtgcaaggtaaatattttacaaattaggaaactgagactcaggtagatcatgaaattcactaatgccatttagtacacttatttagtctcttcgatacatagcctagatcggtgattctcaagtggggcggttttgcactccggggacatttggcagtatctggaggcgttttgggttgttacaccttggaggaagggtgctactggcacctagtgagtacaggccgggatgctgctaagcattccattatgcaatgccgcgacacggaatcatctggccccaaattgctgaggctgagaagccctggcctaagcaaagcctgaaatctctgcagatgatggctgacaggatgattcttccttctgcagattcggacctcgccgcatccgggaagaatcagtgatgcttgggacagtcaatcctagcacgggggccctccccttccagtccctcatggttgcagacctaggcgatgtgaatgtcaatctttacaaccttcaggacagctgccggcgaattcaagaggcctatgagaaaattgtagcagctggctgtattcctctgaccttgggtaatgtcagtctgcaagagccagagtagttccctgcactcagggtttacttatcctgtactcaggggcttgagtacagctacttctcccctgcaagccactgcaaatgtgcagacagtaggaaagagagcattgtaatttatttattttaatccctggggagagaatatttcacgtgtgtgtgtatgtgtgtgtgtgagacagtctcactctgttacccagactggagtgcagtggtgcaatctcggcacattgcaacctccacttcctgggttcaagcaattctcctgcctcagcctcccaagtagctgggattacaggcgcccaccaccatgcctggctaatttttgtatttttggtagagtcggggttttgccatgttggccaggctggtcttgaactcctgacctcaagtgatccgcccaccttggcctcccaaagtgctggggttacaggcatgagccaccgcgcctggccaagatgatgtttctaatgactttatttgcgaggagaactgcaaagagggtgtttttgtcctgctcagggtctacatcaacctatagggcagctttccccttatcctcacccctgacccactctcactttttctcttgttcacaaatacttaaaatgacagggatcttttcctaaatatccaaattcatttttgccaagttagagagcctagcctgcatggcatagtgggaggagtgtggtttcccgatggcatggtttgaagtctcagctgcacttctccctagcaatgttgctgtataccgtgcttgatgcttcacaccctcacctgtaagatgggaatgatcacagtaacacctactcactgcatgatgtgaggggcatataatgaaagtgcacatgaaatgcccagcatcaagcatggcatatcttttttttttttctttttttttgagacagaatttcactcttgttgcccaggctggagtgcaatggcacgatctcggctcactgcaacctccgcctcccgggttcaagcaattctgtctcagcctcctgaatagctgggattataggcgcccgccagcatgcccggctaatttttatatttttagtagagacggggtttcatcatattggtcaggctggtctcgaactcctgacctcaggtgatctgcccacctcggccttccaaagtgttgggattacaggcgtgagccattgcgcccgacctatgcatggcatatctgaagcttcaataaatgttaactgttattattatcagaaagaatactttcctaggtctgtgctgtccagtaaggtagccactagccacatgtggctacttaaattctttttttttttgagacagagttttgctcttgttgtcccgcttggctcacggcaacctccgcctcctgggtccaagtgattctcctgcctcagcctcctgaatagctgggattacaggcgcgtgccaccacgcccagctaatttgttgcatttttagtagaaatagggtttcaacatgttggcaaggctggtctcgaactcctgacctcaggtgatccgccgcctcagcttcccaaaatgctgggattacaggcgtgagccaccacgcccggcctaaattcaaattaattaaaataaaatattcagtttcttagtcatattagctacatgtatgtcacatgtgtgtcacatgtggatagtggctaccatatgggccagtgcagatagaacattgtcatcatcatagaaggttctattgaacagagctattctaggcattttcctagaatactctgaaaaggcaattcctagagtagctcttaacttgtctaatttcctcttttatttatttatttttgagacacggtctcactctgtcacccaggctggagtgcagtggtgccgacatggctcgctgcaaccttgccctccctgggctcaggtgatccttccactccagcctcccgagtagctgggtctacaggcgtttgtcaccatgcccagctaatttttgtattttttgcaaagacggggtcttaatgtattacccaggtggaccttgaattcctgggctcaggcgatctgcttgtcttggcctcccaaggtgtgagccactgcgcctggtctatttttatttttattttttagagacgtggtcttgctgtgttgcccaggctggtctcaaacttctaggctcaagctatttatttatttattttattttattttttgagatggagtttcacccttgttgcctaggctggagtgcagtggcgcgatcttggctcaccgcaacctccgcttcctgggttcaagtgattctcctgcctcagcctccagagtagccgggattacaggcatgcgctaccatgcccggctaattttgtattttcagtagagacggggtttctccatgttggtcaggctggtcttgaactcccaacatcaggtgacctgcccgccttggcctcccaaactgctgggattacaggcatgagccaccgtgcccagcaagctattcatttttttgagatagtgtcttactctgtcgcccaggttggagtgcagtggcacgatcacagcttactgcagccttgacctcccaggctcattcagcatcctgccattctataagatcttactgtagctgtggttataactccccccaggctgaaagggtgaaaattgagttaagattattcagctgggcatggtggctcatgcctgtaatcctagcactttgggaggccaaggcgagtggatcacttgaggtcaggagtttgagaccagtctgaccaacatggtgaaactccgtctctactaaaaatacaaaattagccaggtatggtggtacacacctgtaatcccagctactcgggaggctgaggcaggagaatcgcttgaacctgggaggcagaggttgcagtgagccgagattgtgccattgaactccagcctggacaacagagcaaaactacatctcaaaaaaaaaaaaaaaaaaaaaagattattctatgtaatcctccaattcactttccagatgttttcttcttcctctttgcaggtggaga

SEQ ID NO: 97395 - DNA, 14398 bp, Homo sapiens
gtaaaatggatgtccttgttcaagttcaaggccaatcttcctacctgtgctttggatctcatagtcctggccccttcgtcaagtatctttgccttatcaaatagctccctttccccttgttttcaaattcaattaactcttaaaattcagttccagtgtcagttactttcctcattatcctcctccctcccgaatctatgttaagcttgattaggatcgtactctacccatataatactgaaagccacaatattaagcaagccagtcctgtttgagggtacagattttattttgatttctatatatattttgaagcctatgaaagcttctggcaaacagtaggtgaaagctcaaaaaatgtgtggaataactatattaatgatctcatgaattacattccaatgttctagtccagttccgttttacagaaaataaactgaggtccagagaagttgaataacttgcctaaggccttacaaccagtcaggggaagaccaaggactacaattttggattccttactaattaaggatccctgacactaggccctcccgacactctgtgaatcattgtttgctgtgtattttctacatttgcagaaaaagaaagcaatacgtgccatcttttttataaggcgtagacttttcttagtgtgtatggttttgataaagcttttattgatagaaaactcagaatcaagagtaatggactacaatcacccttaaatgaggcagcctggcctggtggaaagagtatcggcctctgagaactagggtgtttattcagtaaatttgttgtcaagaggaataaaaagatgactaggatactgtctacatccttaagcacctgataacctaatagaagaggtaaagacatgtccacaaatgattattataaggcagaatgtgaagagttgtagaagttatgaactaactatggatgtacaaacatggaagaatcactcaaagtttgggaaatcaggaaaggttctgtgaaagcttttagtcttgtgagaataggaaagatgtgtagggctttgctggaattggataaaggcctttcagatgggaagagtaaagctttaagaaggctgaaaataggccggtcacagtgcctcactgctgtaatcccagcactttgggaggccgaggtgggcggtaatcccagcactttgggaggccgaggtgggcggatcacctaaggtcgggagttcgagaccagcctgaccaacatggagaaaccctgtctctactaaaagtgcaaaattagccagctgtggtggtgcatgcctgtaatcccagctactcaggaggctgaggcagaattgctcgaacctgggaggtggaggttgcggtgagccaagatcgcgccattgcactccagcctgggcaacaagaacaaaactctgtctcaaaaataaaaataaaggctgaaatttgtagaggaacttataaagaatatgaataaaggtatctatatacacatctatctattcatttctggaatggcaaatggcagagtgagaagctcagcaaatcatttccctcaaaaggaataaaatggacaattaaaaaactcgaaccattcaggattctggaaattgaccaaaggcatacaacaaaatgagaagtatttatccaagaaaaactcctgaaccaggaaagaacagtgtgtctgtgatgttttagcccagagctgctctcatccccttccagctccatcagcatggcagctctatcagggcaggacaggctgtgagggttacctgatttggagtagaatgcagaaaaactccgtgctcctgggcattgttagaaatgaaaggaatctcagtagcaaatgaacaggaaaggccagtgcagttagcctgaggttctggttggggcaagcaagagattgacagacaagccagaaactaacagggagattcacggaatgaaacagccatagtgtacttgccacacatctctggtggcatggaaggatgaacgcaagagcaaggttgagcacaatttaagagaaaccagagaaagccctagctacctctgaacattcctgactaaatgtgagaccttagacataaggccttgggtgaagtaaaagctgggaagacttgtaaactgcataaactttgaatgtgttctccagcttacacacggatccactgacaacacgcagaagcccttcctagtcaaaggtatttgggtacaacctctgacaaatcacttgttgaccactaaactatactgacagagggctgactcctaggaagccaggcttaaaaaatataaacaagattttagaaatacaaaactaagcaaagacatcaatgactgtgcaacatggggaaaagagcctccaaagaattagtctacaccaatcactaaacaaagagaacagcagttgcaacaactaccacctccctgggtcacagagatgagatcagaacccagagttctacaataatgttatctaaaatgtccagttttcaacaaaaaattacaagatatgcaaagaaacaggaaacagtggcctactttcaggaaaaagaagtacctgaattctaccccactagatgccagaatcaccccctacccccagtcatgacaatcaaaaatgtttccagacattgccaaatgtccctgaagggaggaagggcaaagtcaccccctggctgagaactactgctctaatgctagttatcacatagtgtgatactgggataagaaaagacatatatcaatgggataaaattaagagtccagaaattaatgtcagttgatatttcacaaaggtgccaaagcaatttataggaaagggatagtcttttcaataaatactgagataactgggtattcatgcacaaaacattgttagacccttcatatacatgaggaattaactcaaaatgaatcatagacctaaatgtaaaagctaaaactataaaacttttagaaaaaaaattaggtctaaactcttagtgactttggattaggaaagaaagcacaatccatagaagacaacattgataaactgcgcttcattaaaattaaaattttttgcatgtcaaaaacatgaataaaaaattgaaaagacaaaccacaatcttagagaaaatagatatagaatatataaagaactcttacaactcaataagacaattcaatttttaaaatgggcaaaatattggaataaacattttaccaaaggcatgaacagctactatcacagacagtcaacaccattagtcatttgagcaacataaattaaagccacaatgagatacaacttcacacccattaaaatggctataataaaaaagacagataataaaaagacaataacaagtattagtggagatgtggagaaactggtacccttgccatcatacattgctagtgagaatgtaaaagcagtactatggaagacagtgtggtaatttcttgagaagttatacataactttaccatatgactcagaaattccactcttaggtatatacttgagaaatgaagacatatatccacccaaagacttgtatgcaaatattcttaacagcatcattcataataaccaaaaactggaaacaattcaaatgtctatcaattagtgaatggataaatatggtatatccatacaatgaaattcatttagcagtaaaaaggaataactcttgacagttgctatagcattgacaaaccttaaatgcaaaacattatgctaggttaaagaagccagatgcaaaagaccacatactgtatgatttcataatataaaatgtccagttaaaaggcagatctacagagacagaaagtagaccagtggttaccagtggctgggatggaaatggagattgactgcaaatcaatacatgggatctttgtgtattgtgggatggttgtacagttttataaacttactaaaaaatcattaaatcatacacttaagagtgggaatattttatgtaaatcatacctcagtaaaagtttcttttaaaagttaaggaaattgcaagaaattgttatgtccttatgatataaagataactgctattaactttttgtatatatttttgctgtgtatccaacaaaaagtgacttctgctatagtttttaaagtgcttggttcacatgcattattgatgtatttgcatattaaacttttttttataaccacaacaaaaatacacgtcttatttcatagaaccatgaaggataacactggaagacttgccttcattttaccctcccttttgggtttcactttccttgtgcctaaaatgagaaggtataattagatgtttcattggctcttcactgccctgttttaattgcccttattattttttttctgttcctttagaaatgattactgcaatctgctaacaaaaatacgtaaaaacaactaaagctttaagctaaatttgggctaggtgcctggatttttctcatttaattatcctagaaatcctgtattatccttcttttagaggcaagaaaattgagatttagtagggttaagaaatttgtcttagaaagtagattcaaggttaccaggtaatatggtttgctgtgtccccacctgaatctcatcttgaactgtagctcccataatccccacatgctgtgggagggacttggtgggaggtaattgaatcatgggggtgggctttttcccctgctgttcttgtgatagtgaataagtctcatgaaatctgatggttttataaagggcagttcccctacacaagctctcttgcctgctgccatgtaagacatgcctttgctccttcgccttctaccatgtgaggccttcccatccatgtggaactgtgagtccattaaacttctttttctttataaattacccattctcgagtatgtctttattagcagtgtgagaaccgactaatacaccagaagttgggggaggaaagggagcactggggagttattgcttaatggttacagagtttctgtttggaatggtgaaaaatctagaaataggtagtggcaatatgttgcacaacattgctgatgtaattattaatgacatcaaattgtacatttaaatggttaaaatagcaaattttatgttagatatattttacaataaaaataaaagaaacttgttaggtcaaccaagaagtaagggtgcaggctcactcactatctgaaccattctgagcattatttgcataatgacagttcctttgcaatccaatgaaataaagatggatatttcagttatctggcaaacaaagagaagcccagattttatcaaattatagtcacttagagctccttatttttttaattttttctggtcctgttttagttgttccagaaaatatgtctgcaattaattttgatacatccacaatgtaatttcttaagtctaaaattttgatcaagttgaaatccactgtgccaggaagaattaagaaatcaaggatgtaaactagctgttatttcagaaggtttttaccactaccttatttgatgctccccgggtaaggggttttaaatatcctttacttttacagtattgacagactaaaccactatctatagtccagctgatactattgctgaaggcttttgggcctatatttgcccaaaaatcacttaagaagggtcaggtcagattttagtgtgacagaatgaggtccagtgactgaggcagtctttaagcttaatgatctcagaggctgaactggactaggtcttagagataacatcacagtaatactataaggttgtcacataagtctatggtttgttttctcaaaatcagttggaataaaatacgactctctaagcaagctcttcatctttctataacatcaagaatgtaaagattagctgatccaaaagaaatactctctgaatgagagactgaagaccaccagttactgtaaaagccaacgttgctcttctgtacataggaagaaactgaactgtcatcagcgggtaaaaatgaaggctaaacaaagaattttcacttaaagaacatctttatttgaactttaatatacaatattacctttaatttataaaaatcacatactggaggacatgactggaaaccagtttaggagcagccagkgggtaccaatttaggagattatacttaccccacttattagtttaaraaaaaattctatcaatgaatttgagaccagtgatattgaaggatggcayttcaacttccaaatccagtaattaaaattgaagatactttaattcagcaaaaacttctaaattttctttaaaaatattttttcccaatgaagaactgagcttatctttattatgttttctggtatacatcttacagaattttgtagaaataaaacagccacaagacatttgcaattatttaaaatcctctgcatattaatatgtatgtgtataggtgtgtgtgtttgatccccacacttacattcacaccgagctgaagcaacctgacagcatgttggacctggaaaggcagttcatttataatgtggaagagagacagtaagtctctgctccctctatcatcctgaatacaggcttcccctcctctaaaatttccccaaatagtgaaatatttgataaaattcttaaagaaaaatctattatctgttagcatgattggagcactgcaatgtatatgctagtaatatggtgtgtaatttcacaagcaattttatgagttctgcaattgctaggctcaaaccaagtttgaaatggattagctgttaaatagtggaagtttaaggatgaggtatgctttagttgaaaatgatgcatatagacattctgaaataatgctacttacttgtaaaggattgagagttatgcaagagaaagggattctccttttggatatatcttttctctgcactcctcagactcaggctattctagaggtaacaggggcagtaccgttctgcagtctaaaaaaggaatagtggctgccaaatagcagatgagtcacataacccattttctgttgcttagaattcttcaaaagtttgctttctgcagcacaaagatcagacattctatcatattcttgctgtagagctctaagagtacccaagtgggtgaatttctgcagctctagcaatccagaatcctggttcaagggtcaatgagcaggagaacttggagagtatattattttgacaatacacagaccttctttttacatagagaatctgaaattatggcattaaatgacaaggcaaagaaaatggctgatagcatacccatcttcccttaccctattctgtctctttcattatagtcaatcgtcctgaaacctgaacagactccaggaagagtgtatctgctttcaagacaacaaaatattatagctttaggttatacagatacacacaaccatatatacgcacatctttttgatttaaaaatgaattatgtaaatcaaaacagaaaagacgcagatcaaaggttagagggtctaacacaaaataaacttgggatcagggtcactaactatgacccatggaccaaatccagccctccatctgcttttgtaaataaagttttcctggaacatagctacgcccattctttacatagtatctctatctgttttcgatacttcaacagcagaaatgagtaataagagagactgtatagctctcayagcctaaaatattatctggaagctggctgaacagttatagatcaaaaagagcatgtccatcctgatctgaatgagctaaagtaacagaaaatcatctttatcagtgttcttgagccaggataaatggattaaartatctccatatcatatatagttactcaaatattctgcttatttgtgcagccgaaaccagttttcaactgtgtttgttaacaaagagtattaaaaattatctgtgtataattgtatttatatacatatatagatcttgatctctcatatatctcatatatctctcatatatatatatatatatatatatatatatatatatatatatatatatatagagagagagagagagagagagagagagagagagagagagagagagaggaaaagataggacctagccaatttgagtataaggaaacctaaagaaaaataactcaaaatactattactaggaactgttatttggaactttgaatattttagtatatttttctttatatttaacagcatgggactattaatagggcccataccagagcagacacaatttacaactgcaagttttacccatgaattatgtgacaaaatctttttgaatataaaataaccagcatttctataaaacactgctttttaattatgcaattaaagtgatatagcaaaataagaacgtttttatttctaaagtaaatattttagtcaaagttgcatcagaaatcaagtatttctttgacattttcaagaggttttagttattaactacaattatagttgtattatatagtaacacattgttttaaaatatattataaaccttttctttttcctctttaatttatatgaaatataaaattaagaattttgtaacacgattcatattggaaacatttaaaatgttgtgagctactcttatacagaaaatgctgtggaatcacataaaacattctaatgattgaaagtgccaggcacaatgcttggcacatgttagatacttcataaatgttcgttcacacattctctcatttactcatgcactcattcaaaaaactccaggcttaaggagaaactgcattataaatgagaatggcaaacacaatcttttatcaacaaatttggagttttgacaaagactttggcaatggagactggagaagatgagaggatgatgattaatatttcaaactgcttggttaaaatctagcaagtatagccctgagttgctctatatgacatcatagaggatcagggtcaatactccataaaaagaatgcatttcccttcgatacccaggttttattttacatataaacacctgcttaaagtcaggaatacgctgatgttagagagatacaaaatgtgcaacccacaagaaagtaagaaccacctgactggggacttatttttctgagttgagacttctttttggttagggccccattcccttggttttaacaacttaatactggttgaataataataataataataatctggtttaacataaaaagtgtgattctaaaatgaagagaaataaatgtagaaggaagaacagtgttcaaaattcctatttttttcgattatgcaccaactgatgtatctattctgcacatttgtgccaaaggcacaaggtaaggtgtcagctctttgaagaggcacctgaaaaggaccatttctgggctttttgcagaagatcttataaatgcaatgaatatttaacctgagtattaaggtctacaaaatgcaaagagctgtaaaagacagaagaaagtaaagaatattcttggaagctaagcattatatgggataagaattgatcttgaaggaaataatttaaaaatctataacaaaaataaaacatgacactggcaagtcatttgtagctgactttaattgcctttggtattcaggagaataaaaaaatggaagtacttttataagctctagtctttccatcacatagaaggtaaggagtggtgaagaagacccttccattgtccctgtcaaattctttgtttgtaccagaactggctctgcttgtatacttccctgccttctcttaagcttcagtcatctgggtaatacaaatagagcacttggaagtaggggttctgtctcctcatcccttgagaagttcctgcagaaccaagaaggtccctttactctgcattcttctaaataaggtaaaagagaattcagagagttcattgccatctgcactgctgctctgcatctttgccaactcaagtttttcactttttctcagtgattcataagtgggcttgtgctacttttacgaggaaggctaacattttttagaaccaaatactttcccttttcccttctacagttacagtaatatatatacctttctcatttagaaatttaaatgttcaagtagtaaaagatattacaatgtcaaaacatgtgctataatttaactctcttaaggactattgtaactggccctgcatccttattttctactgaaatttttttgcagtgaaaaattttatactgaaaaaatttgcagtggttatcatttacggatcagtagaactgtcaaaattaacgattcgtggtataagatgatcaaccttagaaaatactatattagttaattaagtctttccccaacttaaaacctaagtttaaaagaaaagcttatcaaacaagaaaataagccttcagaattccaaggtgggcttcttgtacaaactttgtttcaggaaatcttcaaattcagagtaaatgttatactaattatactgtttctaagttttattaatgtcaatggaagatgcctatattaaatgaaaagagcaaaagtatcttgcactgtcacataaatttaaggacagaaaatttataagcactagatatttatcttacagttcctgataaaatttaagttctttttgtcaaaatataaagaactagtagtttatttaaaaagaaatatcaatgcaaaacctactgatagtaagataaagttccttagatgtatcccaattttagtgtaatatgattaattacaacactcttttatcactgaaaattattttgaaactattctgattctttggaattctataaatattcttggagaaaattaaaaaaacataaaatatctgtgaacaactcactcatctgatgagattataaataaaagatcccctgtccctattccagatagaatattttagaaagtttcactgtttgttctgctttagtaagttataaaagtaatttatttagcttatcaaggcaaatttagagctgccttatagtgatttttgccaagccacataaataaagttgtaagttgagtgactctactaactttattatgaaattaaagtgaataaaatttacttggtagatgtgttggtctggaaaaataatgtagcaacaaaaccaaggattgctcttaggtttcaaggcaacaaactgcggcattttccccactttctgtcatgctaccaacactagactgaactacatgcacaaaatcccaaacccaggctcataagtggtgattatgataaatagcagtttcgatgattccataagaagaaaaagacttgagtattctttgtgagatcatgcccccagagaaaattaaacttaaccaagaaatttcaatgaaatagactgggatttgaaatggttgccagtctggtcatccaatggggaacttgaaaattcagatagggataggtactcctgtttcttttttgagtcttcttgttactgatataattatactattcttttgttcttgtttattttagttcattccattattaaaatggagaaaaagtgataagcaatatgtaaatatttgatttgaatgctgctccactgtaggaggaaacaaatacataattggttccaaaggccatcttgaactcctgcaaggtgctctatattcttgacttgctttcaggaagtctagcctccagacttcaggactctaaaaacaatacagtagtaacaggtatcacttctcatgtgaccacctcattaacgatcaaagcacatccaggtctctgtcctacacatatcagaacatgttttggtcaggtataaaatggaataatttcaaagttgatgtatctacaagttgaacagtcttagggggaatagtttcaccctgtcatgttgacatagaggtccaggttttcaaaagccgccccttcaaactaatttctgtagtggtccatgtaaacaaaacacaggtgagaatggtccttctggaactgctttcatcgaacagcaggattacctgaaagtgtggtgttggctaaatgtaacacaggcagagggtgagcctctgtattaaacacccagtggtctaaaggtaaaaggtcatcaccggagaacagcagatacaaatatctgaaaataaaaaggggagaaatgagcttcagttagaattcaacaagaacatgaagtgagctcacttttaatggcacagaaaaccaataacgtattttgagcagctttgatgaaaaacatcaaagaaataaacctcagacacccaaatgatctaaacacaaagacaagaggtttcagaatagtgtataagaaatccagtaagatgaacaactagacctactgaaataaaacagtttaaaaaaaaatccggccaggtgtggtgaagagagcagacacctttgtcttgttcctaatcttaagagcaacacattcagtttttcaatatgatgttagctgtaggtttttcatatatgcccttatcagggtaagaagtttccttctattcccagtttgctgagagtttttatcagaaatgggtgttggattttgccaaataatttttctgtctactgaggtggtctattttagttcattgattttcaaacattaaatcaaccctccacacctgggataaacccatttagtcataacatattatctatgtaatttgttgttagagttgatttgtcaaaatcttgtttagttctatctatgttcaggaggaatattggttctgatgaggactctgctgtcattcatttttttccataagttactggggtacaggtggtatttggttacataagtaagttctttagcagtgatttgagagattttggtgcacccataacctaagcagtacatactgcctcatatttgtagtgttttatccctcgccaccctcccactcttcccccaaactccccaaagtccactgtatcattctcacacctttgtgtcctcatagcttagctcccacatatcagtgagaacatacgatgcttggtttttccattcctgatttacttcacctagaataatagtttccaatctcatccaggtcactgcaaatgctgttaattggttcctttttatagctgagtagtagtccatcgtataaatataccacagtttctttatccactcattgattaatgggcatttgggttggttccacgcatttgggttgcaatggtgaactgtgctgctataaacatgcatgtgcacgaatcgtttttgtataatgacttattttcctgtgggtagatacccactagtgggattgctggatcaaatggtagttctacttttagtgatttaaggaatctccacactgttttccatagtggttgtgtaagtttacgttcccactagcagtgcagaagtgttccctgatcactgcatccacgcccacatatagtgttttttgattttttgattatggccattcttgcaggtgtaaggtggtgtcgcaatgtggttttgatttacatttccctgatcattagtgatgttgagcattttctcatgtttgtggaccacttttacatcttcttctcccactctgtgggttgtctgttcactctgctgactcttccttttgccatgcaaaagctctttggtttaattaagtcccagctatttatctttgtttttgttgcatttgcttttgggttcttggtcatgaaatccttgcctaagccaatgtctagaagggtttttccaatgttatcttctagaatttttatagtttcaggtctgaaagtccttaatccatcttatgttgattttcgtgtaagatgaaagatgaggatccagtttcattcttctacatgtggctagccaattatcacagcaccgtttgttgaaaagggtgtctttaccccactttgtttgtttgctttgtcgaagatcagttggctgtaactatttggctttatttctgggttctctgttctgttccattggtctgtgtgcctatttttatacaagtatcatgctgttttggtgactatggcctgaggtatagtctgaaatcaggaagtgtgatgcctccagatttgttctttttgcttagtcttgccttggctatgtaggctctttttttgttccatatgaattttaggatgttttttctagttcggtgaagaatgatggtggtattttgacaggaaatgcattgaatttgtagattgcttttggcagtatggtcattttcacaatattcattctacccattcatgagcatgggatgtttccatctgtttgtgtcatctatgacttctctcagcatgttttgtagtcttccttgtaaaggtcttttgcctccttggttaggtatattcctaagtgttttatttttattttttgcagttattgtaaaagcggctgagttcttgatttgattctccacttggttgctgttgttgtatagaagagctat

SEQ ID NO: 97396 - DNA, 14602 bp, Homo sapiens
  misc_feature (1)...(14602): n = A,T,C or G
gtatttaaagtaatattagccatacttgttccttgtacttctcatttctctctcgctggacacccacacatatgccaaggaacctgtggctgagggggagatgctgttctgaggttgaggctttgtgatttggtggagaggtaaagtgaagaatggtctgaggttgagggaatacagagagaaggaaagatgttatcatttcactggaacagaattgggtggaaagttacaaccttaaagatcacaaggtagaggaggatgagctctgccttccttaaatacaacctgcccatctcccttctacccgtcctcatcccgccttgatccaaaagctgggcaagcaaagtaaaaccaatttccaaaagagaaaagtcagcagcatgccatttactggattagcagccaactgcatcaactaattaatacttaaatccaccccatcatctcccactcattttgcaagactgtggaggaaacaaagaagtaaaatatattactaaactatgattagttattctgtaacatatgagaatttatcaatcccaaataggattctccttaaatagttatcttagagggttatacacttattttaatgaacctgtcccattgctcaaaatattaaaaacaaacaaacaccattcctcctagaattaccttcagagagagtttggaaacgccttgatttaaaaaaaaaaaaaacaaaaaaaaagccttcctttattgtcacgcctcctttgtatatggacatttgccatatttatcacccacctcattcattaatttagcaagtatttgtctattgagtcctattatggtatagcacagggatacaagggtgaacaaaaccagactcagaaccttcatatatcttgctgaggagagagacaatcacagaaccaccaaataaatacaaacttcttgtccaaagtccagaggaaagcacatggtattactgagtctgtagtggttatttgacatggtgaggttacgctgagagctgaagcatgaataggtgttaataagggttaagcaagagggttaagagcatatgctaaggcctgtggcagaaaagaacatacaagccaaaagtacccaaagccagagtgtctagagaggaacagaacagaaagtgagacatgggtaatggctgggtgcggtggctcacgcctgtaatcccagtactttgggaggctgaggctggtggatcacttgaggtcaggagtttgagaccagcctggccaacatggcgaaaacctatctctactaaaaataaaaaataaaaataaaaattagccaggcatggtgacacccacctgtagtcccagctactcagaaggctgaggcaggagaatcacttgagcccaggaggcagaggttgcaatgagctgagattgcaccactgcattccagcctgggcgacggagcaagactctgtctggaaggaaggaaggaaggaaggggtaagttcagaacacacagggacttacagggcacattacaatgttatatttatctaggctgggcgcagtggctcacacctgtaatccaagcactttgggaggccaaggcaggtgggatcacttgagcccaggggttcaagaccagcctggacaacatggggagaccccatctctacaaaaatacaagaattagctgagcatggtagctcatacctgtgtagtcccagctactcggagcctgaggtgggtaggtggcttgagtctgggagatcaaggctgtagtgagccaagattatgccactacactccagcctgatgctcagagcaagctcctgtctcaaaaaatatatttatcatacagggaaaaaaaaacagtaggaaaccctctatatccgttatctattgatacacaacaaatcaccaccaaagttaatggcctgagataactttttatttatttttattttattttatttgagatggagtctcgctctgtcactcaggctggagtacagttgcatgatctcagctcattgcaacctccctctcccgggttcaagcgattctcctgcctcaccctcctgagtagctgggactacaggcgagtgccaccatgctcaactaattttttgtatttttagtagagacagggtttcaccatcttggccaggctggtcttgaactcctggtgatccacctgcctcggcctcccaaagtgctgggattacaggcgtgagccaccacacccagccacctatttatttatttatttatttatttatttatttatttagagatggagtctcgctctgtcgccagactggagtgcagtggcgatcttggctcactgcaacctccgactccctagttcaagcgattctcctgcctcagcctccccagtagctgggattacagatacgtgccaccacgcccagctaatttttgtttttttagtagagacgggatttcaccttgttgtccaggagggtcttgatctcctgatcttgtgatctgcctgcctcagcctcccaaagtgctgggattacaggcgtgagccaccgcgcccagccactttttatttatttttaagaggcgggggtctcgctctgtcacccaggctggagtgcactgacatgatcacggctcagtgcagcttcgaagtcctgaggctcaagtgatcctcccacctcagcctactgagtagctgggacgatgtgcaccactgagcctggcttttttctttttttttgtaatgatggggtctcaccacgattcccaggctgatctcaaattcccgagctcaagttatccttccatcttggcctcccatagtgctaggattacaggtgtgagccaccacactcagtagaaataacttttaaaaactgttctttttcacgattctatgggcttgctgggagttcctttgctgttttcacctaggctcactcacgtggctgcactcaaatggcaggtgagccaagcaggaaaatgcaaaatggcctcaccagcatgtctggttgttggctggcgctcctccgtgtggcctcatcctcacatggtggtctcagggagtgttccaaggggacaaaagcagaagctacaaggcctctgaaggactaggttccagaactcacacatcacttctgccacatctattggtcaaaactagttacaagaccagcccagattcaagggatagagaaagagaccccaattcttgatgtgagatgcagcaaagtcacattgcaaaggaatttggggccaccattaatctaccaccacattaaaagcttttttttttttttttgagatagagtctcaccctgtcgcccaggctgcagtacactggcacgatctcagctcactgcaatctctgtctcctgggttcaagcaattctcccacctcagcctcctgagtagctgggactacaggtgcacgccgccacgcccagctaattttttgtattttagtagagacagggtttccctgtgttgcccaggctggtcgtgaactcctaagcttaggcaatctgcccgtctctgcctcccaaagtgctgggattacaggcgtaagccaccacactcggcccatcatgtatttattaacaatagatacctaccagttccccctctttttttttttttttttgagaccgagtnnnnnnnnnnnnnnnnnnnnnnnnnnnnnnnnnnnnnnnnnnnnnnnnnnnnnnnnnnnnnnnnnnnnnnnnnnnnnnnnnnnnnnnnnnnnnnnnnnnnnnnnnnnnnnnnnnnnnnnnnnnnnnnnnnncaattctcgtgcctcagcctcccaaatagctgggactacaggtgtgagccaccacccccggctaatttttgtatttttagtagagatggggtttcaccatttggccaggctggtcttgaactcctgacctcaagtgatccacccacctcggcctcccaaaatgctgggattacaggcaagagccaccatgcctggccctaccagtccttttttaagaccaaaaagttttgaattgtgacagcatcactgtaataagtagacagcttctcccatgatcacagacaataccattcaaaagttctgaaatgtttgcttaaaaatgatggtatacctcctcaaaagagattaccctctaggttttaacaatttaggtttaaaaaccagctttgcattgcctgtgatagctggtaaatgccatgggtgtggagaagctcatcatgcacatattggtcaagatggatgggtgttgaaaatgttgggtactggccgggcgcggtggctcacgcctgtaatcccagcactttgagaggccgaggcgggcggatcaccaggtcaggagatcgagaccatcctggctaacacattgaaaccccgtctctactaaaaatacaaaaaattagctgggcgtggtggtgggcgcctgtagtcccagctactcgggaggctgaggcaggagaatggcatgaacccgggaggcggagcttgcagtgagccgagatggtgccactgcactccagcctgggcaacccagcaagactccgtctcaaaaaaaaaaaaaaaagaaaaaaaagaaaatgttgggtactcagaagttaatgtgaattcagtataggctgggggcacaggataacaatagtagctaatatagtacttacctggtgttttactgtgtactggacaccatttgaagcaccttacacatataagttcattcagtcctcattattattatccacatttttaaaactaggaaaccaaggcccagagaaattaagtaacttgctcaaagtgtcacaactagtaagaggtggaagctaggatctgaactcaagccagctggctctagactgtgttatcaccctccataacagaacctgggctgcaggtccaggagaggagggtgaggaggcagctgtgtgtgggtgtggcaccatgaggggaatgtgggttgtgagtaccatgtcctgtttaccagtgggagaagtcagacccctgagtcagaacttatgctggggagctttgctggggccatcacgatgtgtgggtgtccaggcctccggaaggaaaggattcccagcattcctaaagccatggtcctggaatctaggtccctccttaggctgagataccagctgagagttaagcagtttggggagaatgaagtttaggaagccagccttacaaacaacacagagaggtcatctataatgagaattgagggcaaaatcgattcaaaggcccagggaccactaaaggttgggcagaacgggccgtgtttggaaactgggtgggattgtgaaactaactgcgagcaactgaataggcggagggggctttagagacttgtgccagtgactgagggctcaggcgcagagagagacccggggctttgtacatggtagaattaaggagcgctggcgttgcgttgggggaagaaggaaagccccaccccgctcccccgggagtagggaggaatgggtgctttggcccccagggctccggtcctggcatggcctgggccgcctccccgactccatcattgctgtcattcccggcctcaagcctccaccgcccccacacgtgccgccacagggagcggcccgatcaaggcgtgacgctccgaagggtggggcctcacttattcccctatttaaaggggaaagaggccgcggcgccggccccaggacccgacccggccccaggagagtgtgctcgttctgttcacggagctggccgcgttagcgacgtcctcgagtccgcggcgggcacgatgcagctcttggtgagggtaccctctcttccggagcggggcgagctggactgcaacatctgctaccgtcctttcaacctcgggtgccgcgcgccccgccgcctgcccggaacggcgcgcgcccgctgcggccacacgatctgcaccgcctgcctccgcgagctggcggcgcgcggggacggcggcggggcggccgcgcgcgtggtgcgcctgcgccgcgtggtcacgtgccccttctgccgcgcgccctcgcagctccctcgcggcggcctcacggagatggctcttgactcggacttgtggtcgcgattggaggaaaaagcgcgggccaagtgcgaacgagatgaggctgggaacccggccaaggaaagcagcgacgctgacggagaggcggaggaagaaggggagagcgagaagggggcggggcctaggagtgctgggtggcgcgcgctccggcggctctgggacagggtcctggggcctgcgcggcgctggcggcgtccgctgcctagcaacggtgaggggctgcccggggaggatgcaggggagagagcgccgaggaataccgaggttcgttggcatgctcctgctgccactaacccttcttctttcccccagtgctctactgtgcggagatcaaggacattggccacctgacccgttgcacgttgtaaccgaggaactcggaagctacagccgaaggaaggtgggagctgcagcctcgcgggggctgatgtcaagactactstctctcagatcccaggattggcatgtgatgagagagatgagccgaaggcaggagggaacgccctgggaggtgttgatgctgagttggggaggctcctagacgaactcgcccccatctactgactgtgccagtcttacattttcaggatggagtggccaagggatgatataaacaaagcctacgttaccgtgggaagaagacagactgttttcttagctgggacgttggcttttgtccagggtggctctggtgtgtgggagcaacaggtcccattttagcaattctttgtcaatggtttgaattttttttttttttaagatggaacgggagagaagaggctaattttcgcgtcatgttaatctcacttctctggcatgtaagggtgctggtatgcctgctgtctccccactcccagttctgtgttccagaaattgagatggctccctgcctgtgactatgattaggagccttgcttcatttcagaatctcccttcaacctgctagggcaggtatcagaaattccaaagggcatttatgtgaggcacctaattagagcctatcaaagtaggaagggagagccatttgaaaggcatcatatttcaaacttttgctattatctgtgttatctttacagtcacgggaacacactagcgctactgaaaagatacttatacaattttaagtgtctttaaaatttgtgtcccataatgggacatcacctgttgtatatatgccatgtattctattttagaatcctgtatmttatgaccataaagtcatagtcaaggaccagcagtgttggtgtactgtcaacggaagtgcacagtctcactctaggatcccactccagacttcctgaatcagactctggcagggttttttgtttttttgtttttgttttgagccagagtctcactgtgtcgcccaggctggagtgcagtggcgtgatctcggctcactgcagcctccgcctcccaggttcaagcgattctcctgcctcatcctccggagtagctgggattacaggcgcctgccaccacacctggctmatttttgtatttttagtagagatggggtttcgccatgtttgtcaggctggtctcaaaactcctgacctcaggtgatggcgcccaccttggcctcccaaagtgctgggattataggagtgagccaccgcgccgggccagactctggcattttaacaatcccaggtgatgtgtgtgcatgtgaaaatttaagtaccattggtctagatcctacactctttaggatatcaccatctgtaggtagaatatttaaagcataataggtatgactgatagattattttatccaaagttcttttttttttttttgagatggagtcttgctctgttgcccagactggagtgcagtggcgtgatctcggctcactgcaagctctgcctcctgggttcacgccattctcctgcctcagcctcccaagtagctggggctacaggcacccaccaccacgcctggctaatttttttgtatttttagtagagatggggtttcaccgtgttagccaggatggtctcgatctcctgacctcatgatccgcctgcctcggcctcccaaagtgctaggattacaggcgtgagccaccacgcccggccccaaagttctaaagtaacattctattgctaaagaaatcctaacctactatgtaacatttttctcttagttaaaaatgtgaacttattattaacctcaattttttagaggcctccaatctttttaaaatataaatatttttgattgacaaatcataattatacacttatgggggtataaacctcaatttttgtaaccctattttggcattttcctgtccttacatctcagcttaaatgctccctcttttgggaggcctttttctgccttcaacatagtagagccttttccyccacccctctgtaacataatgccctgttttatttttactgcttttattttcatgctttgtgggtgtccccactggagtgtaagccctatgggagcaagggctgacctgtgactgttttatctccagggccaacagcagtgttactgtatagtatgtactcaataaatatttgttggctttatctcttattttttaatataatagccttgtgaactaagtgtctggcctctctcaatctttcagaggctctgtttagtgaacaataaacatcaaggaagtgcctagcagttcaaatatttggtaagctagacagatctgaccctcaacgccttaaaaaaaaaaaaaaaaaagtgtgcctttgcttcatactggagctgaacctgtggagctgtagtgacctctactgactcttaggggaannnnnnnnnnnnnnnnnnnnnnnnnnnnnnnnnnnnnnnnnnnnnnnnnnnnnnnnnnnnnnnnnnnnnnnnnnnnnnnnnnnnnnnnnnnnnnnnnnnnnnnnnnnnnnnnnnnnnnnnnnnnnnnnnnnnnnnnnnnnnnnnnnnnnnnnnnnnnnnnnnnnnnnnnnnnnnnnnnnnnnnnnnnnnnnnnnnnnnnnnnnnnnnnnnnnnnnnnnnnnnnnnnnnnnnnnnnnnnnnnnnnnnnnnnnnnnnnnnnnnnnnnnnnnnnnnnnnnnnnnnnnnnnnnnnnnnnnnnnnnnnnnnngaaagtataatttatatgtacaaccaataaacctgatacagaagaggggatcaggacagaccaggagtgggtgtgaagagagactgggaaaggggcagcaagaaagtgaaggggcagcaaagaggaagtggggggttcgccatgcaaactgccactctccccggcccctcctgggaggggggatgtgcccacatttccctagcctgccctccactattttgctctggtcccaacgacaaggtagctcccaagaccctgactaggtcccctgcctgacttatacaaatttagtctgtatccaggccttgaggagggagggtagtagaagtcttccaggaacctgagccccagagctgggcttccaccacatctggcccattgtattctctcccacccttctaggttacctgggtccctagaacaggttggggagctcctctttggcttgagggagtatcacccaaccattactctttttgtaggggtggtccttggtccctagggaggggggaacattcccaacacaagatgccggtacacaggaggtaactgagccagtgaacggcacctttattctgaggctgaacagcagttgacttcctccctcataactgctccaccctccacgtggggagaggtaggggacggtaacatgcagccacccctcctcgtcccttcctccctcccagggctcattttcatccctctctaaagtccccctcctctcttcaaagctctcttccccacaaaagttcctaaaggccaggcaaggctgattctccacttccacatgagacagagctgattctgcagggaaacggctggggaggctccacctctttcctccccacaaccatttactgggaagttgtgtatacttggcagtgtgggaggaaggtacttggaagaccctgccagccatctcccacccagacttcttctcaccagcacagtcttcaaggcttggtgggaaaggtgtgtgggagtggagaaagacaaagggcccttcttgaagagaggagctgcagagaggggcaaaggggttcctagcccagtgatggcccaaggggtggggaaggtggagggctggcagcaggccccagcgcttgagctgggggtcggcctcggggacggggcctgggtgaagggcaggcctgggatccagtcagtcgtctatacagatcacctccccggctcggggctccttccgatccagcccgtctgacaccaatgcccccaccatttccttctccttcttcacaagcactggagggccgttggtggcggctgtttgggaaaggggtaaggaaagatcaatctccagatcactctcaaacgtcacttcatgacaatggtgaattctcacttctaggtcacctcctgccacttcccgttgtcccacgtgagggagggaagacccgggcaaacccctttccctgagattccactttgtgctacatgattgaacacatgttcccactctctaacccctcgggtttcatattcactttcccttgaaggaacccggagggaggtggctcgggtagaagacaccaagccacagatctactaaaactctggtttttaataaaggggactgaagaggggttaagaaagggatgggtggggggacagcctagaacaactctatcccataaaacaccggataccaccaaggaaatgagatggactagagcagttaaagggcagctgagcagaaataaagtttggcaaaggaggagtgtgagtagcagggggtaggaaaacaccagctgacctgtgatgaaggaccctgcaggcatctggctgtaattggcgcctgcggcggccagggcccctacgggtgcggcgctgaaggccgccccgtaccccggaggtgtagcgtagggacccggcgggtaggcctggaacagagaggaagcagaagttggagttagttcatagtctgtgagaggaaagaagctgtaggggagacattatgagccacactccacaactgctaagggtaggatacacaggcagggagactcactcaagggtgatgactgtgttctagcaagttgtttttccatattgtataggattctgatggaagtgtttgtatgtgtgcaggaggaacacaaacagggaaaactggagctagggggaaagagggttaccggtgtggggtgaggctccgtgcccttgctggccagccggctgaggatgctgcgctcggacatctgaaggcgggctgcgatggggggtattcgggacagcgtggctggcaggcgggtcacgtccgccttcatgtcgctcagcaactcctccagctggttcagaactggggcccgggccacagagaaagaagggcaagagaaagacagggaaatacagagatggagccaggaaaagagaggcatcagatggacagatacaggcagaaaaagagcgagagaggagaacacagatgtcaaagaaccagagatcaagaaagtaaaagaagtagatggaaaacagaagcaactcaggggaaaagaaaaagtgtcaggaaaagagacagagagaccagattaccacagaagacagatggagagaaagaagaaagaaaaagggagcatggaggaaaggaagatggggggacattggaagacatgggggcggggagttgtcagaacatctcatactggaagagcaaggtttggggttggggatgatggggaggaaatagtcaggaggcatgggaggtggtaagtgtcaaagctttaaggaatcacggttttaatatgtaaggggagagggaggttagaaggtcagtattacagattcaaggaattagaacagggatcaaaggggccaggagtcagtgactacaccaggcaggattagatggttagagggctttgggatataatctctatcaatggcaaggtgagagggggtaggaggaaaggtcgaaggtcaaagggaagtttcatggggtaaggccagagggttggatgggtggtagtttctgccttatggggtgaaacacatgtgagggaatgtgatttgtttgatcacagccagggatctgtatggtgcattcacagtccaaggcccctaactggatgatgttaagcagtatggcaggcatgcagttccactgccagtgaagaggccccactgtgtggaggggacacagaggctggggcaggtccctctattgggcacggatggaatgctatcagacatggatgagggttggcttgcacaagtcctagaggctaaaatccaagggggtgccaggtcggtaggagtggggttagaggtcagagggggatggttcagcaggtagaggggtcagggggtgggaagattttgaggggtgcggggtgaagacttacgcagcgttgtgggccctcccccgcgcggggccgccgcggcccttacccttgtgcaggacggcgttggccggcttgttccccgccagcgactccttggagaggtgctggtggctctcggccaggcactcggcctcggcgaagcgggcgtggagggccatggcggggtgcgccggctcctgcgacaggttcaggtaggccgcccgccgcagctgctcctcaatcaccagcgcctgctccaggagctgagggcacagagttgggaggtgaaggtagggctctgccagcagtgggtgaggggctgggggggcggacatagcaagagacccaccctgccctcactgctggcccagggcactcccagctccaaaccgactgcgaacctagcagcaaccctgacccagatcacactcccaagcacaaggttacactttggtcttggccccaggtatcacctcagccctgaaggtgttaaccttccctaggttccaactagatctggtctcacttctgacccaagcccgtctataacccgctcctttcctccctcattcccaccttgaacctccgggccaggaacttatttttcatctccagaaagttccccttattggcttcagttttaaatggctcgttgataatggcaaattgagcatcattctggatgtcctgccaccgtgcatagccatggctaccaatgaaggaaagggaaccatcaaggaatttaacaggaatgggcttggctttgaacacttcttccttttggcttgactccccaaagtgtggcactagccctgtccctgggtgtgaaatcatcttttttttttttgccagcttgagagaaccttttccttcttgcatgtgtatcaaaggatacaggacaatcccagccagaagccaatagtcatgtcttctgtgccagatctcattgagtttccccgaggaaatagctgcccgttcctcattctgccacagtgtgtgaagctctgcaaagaaggcagcagacagaagaggtaacagggttttgcagactgcactcagtccaacagacaggtagagatggagaaactgaataatgaaagggaactaagggctcctgaagaggaatgggtaaaggttaggtttggaacaaactcagttctaaccaggttcgttagaattaagaataaaggtgggattagggccagctttggagttaagagggatacttaagaaagatttagagcaaggatcggagtcagcatgcaacatacttcattggaagttacttggaattaaaggtagcaggaagcctcaggcaaaacgagaaaccccatgaggatgagcagatccccttgaggagcagaaagcagcgagagtctccccaacctgtgaagccaccatcggcgatattgaacatgaaccggggcttctctgtcttttcctctcgtcgcccattggaccgtggctcatctcgaggccctggtcgaagctcccggtcaccttttacatcttctgctaggacagacaggtcaaagctcacacctcaggacaccctcctcccaggtcccaagactactatctgtactgtactgtactggcctttcaaacagctacccgcccaggacccaagcattcggttccccagactccacctcccctgatgccctctgggacccaggtgtccggtcccttccacccattacctctcttgcccaaatcccctgtttccccctccggcctctccctgtgttcctgtccatccaacggcttctcctcccccctttctcctggcgtcgactctgtggctgtgggagggggtaggggataggaagggaggatgttaccctcatcccctgaccccagaagagggaaatcccaaattctaatcccccatcactcctaaggccatgcacccacctgacttctctctgtccccacggtacccaggttcaggctccatctctccaggcacccctggcacctcatcctctagaggaatcttccttggctccagccgctccccaagtgatggggctgggctgggggcatcagcctggaagaggacaatggggtcaggatgagccagagggctcccaggtacctggcctcca

SEQ ID NO: 97397 - DNA, 33117 bp, Homo sapiens
ggctttgctgtgctgtggtgcagtgggctctgcccagtccgaacttcctggcagctttgtttacaatgtgagggaaaaaccacctactcaagcctcagtaatggcggacgaccctcccccgaccaagcttgagtgtcccaggttgacttcagactgctttcctggcagcaagaatttccagccagtggatcttagcttgctgggctccgtgggagtgggacctgctaagccagaccacttggctccctggtttcagaccccacggtttgttccaggggagtgaacggttctgtctggctggggttccaggcaccattgggttatgaaaaaaaatctcctgcagctagctcggtgtctgccaaatggccacccagttttgtgcttgaaacccagggccctggttgtgtaggcacctgagaaaatcttctggtctgtggtttgcaaaaaccatgggaaaagcgtaatgtctgggctggatagcactgtccctcatggcacagtccctcatggcttcccttggctaggggaaggagttctctgaccccttgtgcttctccttgaggtgacaccccaccctgcttctgctggccttctgtgggctggacccactctctaaccagtcccaatgagttgaactgggtacctcagttggaaatccagaaatcacctgccttctgtgtttgtctcgctgggagctgcagacgggaactgttcctattcggccatcttgcccagctctcccctgcagtctatcatttgaatgtgttctgatttgcttaatcagtaattacctagacatagaattatttctattgttttggctattataaattatattgtgatgaacactcttgttcataatttttacttgcttggtttccttgagaattacttgggaaaggataaagacattatttgggttaaattgacttccatacctctttacagaaaggctgaatcatttggcatgctgcctagaagtaaaatagaatgtctatatcattatttactccacccacattagcactgactgtagctattaaacacaaaatatcttgacaggcataaaaagctaactattacgttggtgcaaaagtgattgcagtttttgccattaaaagtaatggcaaataacttttgcaccaacctaatatttcttttcattagtatttctttcttttttcccttctctctctctcttttttttagactgaatttcactcttgttgcccaggctggagtgcaatggcatgacctcggctcactgcaacctccgccccctgggttcaagtgattctcctgcctcggcctcccaagtagctgggattacaggtgcctgccaccacgcccacctaattttttgtatttttagtagagatggggtttcaccatgttggtcaggctggtcttgaactcctgacctcaggtgatctgccagcctcggcctcccaaagtgctgagattacaggctagagccactgtgattggcctttcgttagtatttctttcagcgctagtgatgttgaatattttctatgtttgttttagtcatttgtattttctccttttgtgaagtatttgatcatatagtttgtgtaagtatctactagcaacttggtgtttttctgattaatgcatttgagttctttatatgttaaaggagtgacctattattgtcacattgtcagacatgtttttcctttgttaatttttgacctttaattttgtatgaagttatatatatatatgtttaaaaattttggttcataaaaatatctttttctttgttattgtttccattctttgaaaattctcttcatatagagaccaaatacattttctatctttctttctaaattttttttgtttctgttttgagacagagttttgctctagtcatccagtctggagtgcaatggcgcaatctcggcttactgcaacctatgcctcccgggttcaaacgattctccctcctcaggctcctgagtagctgggattacagctgagtacctgccaccatgcccatctaatttttgtatttttagtagagacagggtttcaccatgttagctaggctggtctcaaactcctgacctcaggcgatctgcctgcctcagcctccctaaatgctgggattataggcatgagccatcgcacttggccccttctagatttttatagtttgatttttaaacattcaactcttaaattcagctgaaaattattttgtgtgaagtaagaagctaaacaaattgtcccagcatgaactggtgattagttgtttctttttctgtgttaattagcaccttcggtaagaagttcttatatttacagtttctttcttggagactgtgtctattgttctgtgtgtctttctgtctgttcttgcagcagcacctcaatgatttaaatgctttatcttttccatataccttaatatatggtgatactaattctcttcataatttatttatgttccatttgcagggtattattgttgcactagtaattgtaaagtatactgagctgagaaaatctgttgtgttatcaagaaattcagactccaatggaggagataatacatgtcttgccatacaagaaaaagggacaaatgtcacaagagaagttcaaataaaatgataaagaaaatattacttgtttctgaggataaaatagttttgatttcacctgccaagctcatataaaaaatatgcttcatgttgaactcatggaggtggagagtagaatgatggttaccagagactggaaagggtggtgaggggattgggggaattggggttggttaatgcatacaaaagatagttagaatgaataagatctagtatttgataatacaacagggtgattataatcaatgataattaaattgtacattttaaaataactaaaggagtataattggattgtaggtaaaacaaaggataaatgcttgagggaatggataccccatttaccctgatgtgattattgtgcatcatatgactgtatcaaaatatcttatgtaccacataagtatatgcagctattatatacttatataaattaaaaataaaaatataaaatgtatacctgaaaaaaaatttcatgaaaaaattttcctaatttcaaaaatagtacacactcaacacaaaaatcttagaaaactcagagaaatgtaaagggaaatcaactgtgacaaaaggcatccacctattatcactgttaacaattcaggatgagtccttccagtcaacatgcatgtttatgtgtgtcagtatgatcatactgagcgtgctgttttacagcctgtttgtattagttcattcttccacttctgtaaagaaatacctgagactgggtaatttatagagactgggtaatttaattagctcatggttcctcaggctgtacagtaagcatggctggggaagcctcagaaaactttcaatcatggaggaaggtgaaggggaagcaggcatgtcttatacgactggagcaggaggaagggggtgggggaagtgctacatgtttttaaacaaccagatcttgtgataactcattatcaagagaataacacaaaagaggaaatctgcctcatgatccaatcacctcccaccagaccccacctccaacattggggattacaatttgacatgagatttggggacatagacccaaaccatatcattgttcttctacttaacattatgaatgcattgcaagtaatttgttaagatcacttgggattttattggctaatatatcatattttatttaatcagtttactagtacttgtcatatattgctttcagtgttcttttcttaaaaataatgctacagttaatctgtttataaaaatatacataattacaaatgctcctccatacaatggagttatgtcctgataaacccattgcaagttgaaaatggatttaatacacctaacctatgaaacatcatagctcagcctagccttccttaaacgtgctcagaacatttatattaccctatatttggataaaatcatcttgcaatacagtacattgtaaagtcctggctgtttacccttgcatggctgactgggagctgctctggctgctggtgcctagcattgcaagagagtatcatactgcatacaactagcccaggaaaagatcaaatttcaaaatttgaagtatgatttctactgaatgcatacaccttttgcaccattgtaaagtcaaaagattgtaggttggaccatcttaagttggggatgtctgcattttgttggataaattttcaggtcacatttttgaggcttttgttacaatattgtcactttgccccaattcgcctcattagacatcatttgtctagcatccttcacagcctccacggagggagacagtgaagcagtttctctgctgaggactgtcaccttcacagtttacagctactgtaaggggagggtagtttgggaaggagggggtgagatagtaatttgggacaaggttcagcaattgcaggcctctacatttggagcttttctggcaacagcaatcccttagtcagttgtttacatttcatgtgaaggattttatatctgcaggtaattcagtaagtctctcagggtcctggccccttacactgcttctgtcttagcatacggtatggggacctgctctttctcttaggactttttcagacttttgctttaagacttgaatcagaacctgggctagggtgaagagacttgcctcagttgttctgaaatctggccaagagaatgcatttaggaggcatcccagataattatgctttatatagcaatgtattacatttatgggcaagatggtttaagaagatgggtacttggatggggctaaagggactgaggcttgttcattcctctcgctccttaggtaaccttctcccgcagtatcctggttcccatgctttctgtacccacgtgcctactcttgcaatctatacattgttcctgttcagcagagtttggatgaatacccaacagcctgaggagactgactgttacttgaaatgaaggagtgttcttgtttgaacgatcctgctcagaaggaccagcctgggcttgcatctcttgtagtattttactaaaccctgcaacagtagccactttttttccctgccaagttatctaaatgtagagcttcctgtggtctgagttttaagagattacaggtgataattaactaattatttgctttactatagaatctatgtataggtggaatcgaaggtggtggaatctttactgattccctgacccacttcactcagtgagttacatatttgagggatatcagtgaagtgtatcactatggtctacttgtttgcaacttacaaaaacccaacatgaataaccttggtatccatgggctcttgcttccaagttacaaaaacctagcatgcataaccttagagaaaaaagggaacattttgactgatagaaaccatgaaatgagcgaaaaacaaaacaaagaaagtgggcagaaatacaactgggagcagaaacttgaaaccattcaacttaaagaagactttccctctctcttatgtgaagtggtgtatgtagcatagtggttaagagcagagatgctagccctaatagatctgggttcaaatcttagctttatttctcttctgtgacataaggcaagaagcccaaaacttctgtgccccagtttacctatcaataaggtatgataatagtagtacccacctcatacatttattatgagcattaagagagttatcatatgacaaacgtttgaatttgtgcctagcacatagcgggacctatgtataagtgctacctgttattattatggtatctctgagaacattgatttcagttgttcaccattgacttgcttttgttatagagttaggaaatatggccaataaaaatgtttgattcgtaagtctaactgcaacaggagaattctgatctttccctcatcttaagtccaaagatgtaagggaggctctctttgctagcatgagtctggtgctcactcctcagccaatgaaatctcaccaaatttgtggagtttgggaagagtttgacagctactatggcagtcatgtggacatccttgagcagctgaaggtgggtggggaaagtcacagggcagattggttccattgtatatacagtgtctcttggaacctgagggatttgttccagaacccctgcagacaccaaaatctgcagatgcgcaagtccctgatataaattgcatagtatttgcatataatctatgcacaccctcctgtatattttaaataatctctarattacttataatacctagtaaaatataaatgctatgtaaatagttgttacactgtattttaaaatttgtattttttaaatgttgtattttttaaattttttaaaaaatatttttgattcatagttgattgagtccatggatgcagaaccccagaacctgcagatatggaggactgactatacttgatcagtaagatcaaatgaagcctcaacattgcctggcaatccaatgacattttcctagccagcttgctgcccagtttcctgaaatagctatcttaatctttgaacactcatgtcaaacctctgaacatcatcatcctattttcctccatctcctttgcctcaggtgatgaacttactgtacacagaaaattcaccctctagagaaaagtctttcccctctccatgtccaattcattaagaagccctgccagctttgcctccaaagtatatcttaaagtttttagtgcttaatgtctaaatgccttctctagaattgaatttctatgagagtagggaccttaggtctcttatttttctctaccttaagtgcttgatacatagtagaaagtcagtaagtattgaataaataaattamaatagaaggtagacagaaactccctcagcttcctattacttcagcacccacactcattctacyctccttctccatcatctacatctcttaaggaaactcactgttatttatttttgcttcttcacaatatgatttgtgagctttcttttttaaattatactttaagttctgggatacatttgcagaacctgcaggtttgttacataggtatacacatgcagggtttttacataggtatacacgtgccatggtggtttgctgcacccatcaacccgtcatctacattaggtatttctactaatgctatctctcccctagctccccaccccctgacaggccccagtgtgtgatgtacccctccctgtgtccatgtgttctcattgttcaactcccacttatgagtaagaacatgtggtttttggttttctgttcctgtgttagtttgctgagaatgatggtttccagcatcatccatgtccctgcaaaggacatgaactcatccttttttgtggctgcatagtattccatggtgtatatgtgccacattttctttatccagtttataattgatgggcatttgggttggttccaagtctttgctattgtgaatagttctgcaataaacatacgtgtgcatgtgtctttatagtagaatgatttataatcctttgggtatatacctagtaatgggattgctgggtcaaatggtatttctggttctagatccttgaggaatygccacactgtcttcygcaatgtttgaactaatttacactcccaccaacagtataaaagccttcctatttctccacatcctttccagcrtctgctgtttcctttttttttcttaacacattaagttctgcagtacatgtgcagaacatgcaggtttgttacacaggtatacacgtgccatggtgatttgcggcaacccatcaacctgtcatctacattaggtatctctcctaatgccatccctcccctagcccccaaccccttgacaggccctggtgtgtgatgttcccttccctgtgtccatgtgttctcattgttcatctcccacttatgagtgagaacatgcagtgtctggttttctgttcttttgttagtttgctgaaaatgatggtttccagcttcatccatgtacctgcaaaggaaatgaactcatcccttattatggctgcatagtattccatggtgtatgtgtgccatattttctttatccagtctatcactgatgagcattcgggttggttccaagtctttgctattgtgaataaagccgcaataaacatacatgtgcatgtgtctttatatagaatgatttgtaatccrttaggtgtatatccattaatgggattgctggcttaaatggtatttctggttctagatccttgatgaatctccacactgtctttcacaatgtttgaattaatttacactcccaccaacagtgtaaaagtgttcctatttctccacatcctctccagcatcttttgtttcctgactttttaatgatcaccattctaactggcgttagaatgtggtatctcattgtagtttttatttgcatttctctaatgaccagtgatgatgagccttttttcatatgttcgttggctgcataaatgtcttcttttgagaagtttctgttcatatctttggcccacttttttttttttgtggggactaaatgttttaatatatggacaataagcgggttatcacatttataaacaaaacaatttaagagcataagaagtactctaaaggaaacaaacagaaagctggagcaaagagcaatgagtgagacgtctttttgatagaattttccggtaagagctctcaaaagaaattatatttaaactgagactgaaggattcacattaaaagcttagtgcaaattttgaagagtgaggagttgagtataccagaatgaatggaaaaaaatataaaggccttaaagaaagaaagaactgagcatgtttaaggaacaggaagaagacaagtaagtgtaagttacgtgagcaagggggtgggtaggtggtatttcatccattccttcattcatccattcaacaaaaataacaactaaacacaaacacataaataacatgtgtgcatgcacacaggcactcacatacgtacatagagacagaaagagaagctactatgtgtgccaagcactgttctttgctttgggaatacatgaacaaataaaaatgtctccagactcatgaagttttatattattgaggaagggacttaaaccataaatataaaccatatagtattttttaaaataaaagcaatagtaagatatataaggagaaataggttaggagcctccattttaattaggatgatttaaaattttctacatatgtgaatatgtaggaaaataatattccaggcaaaggcactaagataaaagaatgagaaatgtatttgaagaataccagggaagccagtgtgattggagaggagggagcaaaatagaagaaagcatcagatgagctgagagaggaatgggggccagattgttcaggtacttctagatcattgcaggacagattgtgcaggtacttctagaccattgtaagggctttagttttttttttttttaatactttaagttctagggtacatgtgcacaacgtgcaggtttgatatataggtatacatgtgtcatgttggtttgctgcactcatcaactcatcatttacattacgtatttctcctaatgctatccytcccccagcccccacctcatgccaggccctggtgtgtgatgtacacccccctgtgtccaagtgatctcattgttcaattcccacctatgagtgagagcatgcagtgtttggttttcagtccttgtgttagtttgctgagaatgccggtttccagcttcatccctatctctgcaaaggacatgaactcgtcctttattatggctgcatagtattccatggtgtgtatgtgccatattttcttaatctagtctatcgttaatggacatttgggttggttccaagtctttcctgttgtgaatagtgccrcaataaacatacatgtgcatgtgtctttatagtggcatgatttataatcctttgggtatatacccagtaatgggatggtggggtcaaatggtatttctagttctagatccttgaggaatcaccacactgtctttcacaatggttgaactaatttacactcccaacaatgtaaaagcrttcctatttctccacatcctctttggcatctgttgtttcctgactttttaatgattgccattctaactggtgtgagatggtatctcattgtggttttgatttgcatttctctgatgaccagtgatgatgagcattttttcatgtgtctgttggctgcattgatgtcttcttttgagaagtgtctgttcatatcccttgcccactttgtgatggggttgtttgtttttttcttgtaaatttgtttaagttctttgtagattctggatattagccctttgtcagatgggtagattgcaaaaatcttcttccattctgtaggttgcctcttcactctgatggtagtttcttttgccatgcagaagctctttagtttgattagatcccatttgtctattttggcttttgttgccattgctttggtgttttagtcatgaagtccttgcccatgcctttgtcctgaatggtattgcctatgttttcttctagggtttttatggttttaggtcttacgtttaagtttttaatccatcttgagttaatttttgtataaggtgtaagtaaggagtccagtttcagttttctgcatatggctagtcagttttccccaacactatttattaaatagggaatccttcccaattgcttgtttttgtcaggtttgtcaaagatcagattactgtaggtgtgtagtgttatttctgaggcctctgttctgttctattggtctatatatctgttttggtaccaataccatgctgttttggtaactgtagccttgtagtatagtttgtagtcaggtagcatgatgcctgcagatttgttttttgtttttgtttttgtttttttttcttaggattatattggttatatgggctctcttttggttccatacgaaatttaaagcatttatttttctaattctgtgaagaaagtcagtggtagcttgattggaatagcattgaatttataaattactttggacggtatgaccattttcatgatattgattctttctatccatgagcttggaatgtttttccatttgtttgtgtattctcttatttccttgagcagttgtttgtagttctccttgaagaggtccttcacaccccttgtaagttttactcctaggtattttattctccttgtagcaattgtgaatgggagttcactcataatttggctctctggctattattggtatataggaatgcttgtgagttttgcacattgattttgtatccagaaactttgctgmagttgctaatcagcttaaggaaattttgggctgagatgatggggttttctaaatttacaatcatatcctctgaaaacagagacaatttgacttcctctcttcctatttgaatacctttatttctttctcttgcctgattgtcctggccagaacttccaatacaatgttgattaggagtggtgagacagggcatccttgtctggtgttggttttcaaagggaatgcttccagcctttgcccatcagtatgatattggctgtgggtttgtcataaatagctcttattattttgaaatacgttccatcaatacctagtttattgagagtttttagcatgaagcactgttgaattttattgagggccttttttgcatctattgagataatcatgtgtttttttttcattgtttctgtttatgtgatggaatttgtttattgatttgtgtattttgaaccagccttgcatccaagggatgaagctgacttgattatgctggataaacttttcagtgtgctgctggattcagtttgccagtattttattgagrattttcacatcaatgttcatcggggatattggcctgatcttttctttttttgttgtgtctctgccaggttttggtatcaggatgatgctggcctcataaaatgagttagggaggactctctctttttctattgtttggaatagtttcagaaggaatgttaccatctcctctttgtacctctggtaaaattagtctgtgaatccatttggtcctgggctcttttttgattggtagactattaattcctgcctcaatttctgaagttgttattggtctattcagggattcaacttcttcttcctggtttagtcctaggagagtgtatgtatccaggaatttatctatttcttctaggttttctagtttatttgtatggaggtgtttatagtattctcagatggtagtttgtatttctgtgggatcagtggtgattttccctttatcattttttattgtgtctatttgattcttctctcttttcttctttattagtctggctagtggtctattttgttgatcttttcaaaaagccaactcctggattcactgattttttgaagggcttttcatgtctctatctccttcatttctgctctgatcttagttatttcttgtcttctgctcgtgtgtgaatgtgtttgctcttgcttctctagtcctttttttcttttttttttttttgagatggggtcgcagtttgtcacccaggctggagtgcattggcatgatcttggctcactgcaacctctgcctcccaggttsaagcaattctccttcctcatcctsccggataactgggagtatgggtgcatgccaccatgcccagaaaattctttgtatttttttttttttagtagaaacagggtttcaccgtgttggccagtattgtctcagtctcctgacatcatgattcacctgcctcagcctctcatagtgttgggattacaggcgtgaaccaccacgcccagccaatctctatttcttttaattgtgatgttagggtgtcgatttttgatcatttctgctttctcctgtgggcatttagtgctataaatttccctctaaacactgctttagctgtgtctcagagattctggtatgttgtgtcttcattctcattggtttcaaatagcttatttatttctgccttaatttatttatttacccagtattcattcaggagcaagttcttcagtttccatgtagttgtgtggttttgagtgagtttcttcatcgtgaattataatttgattgctctgtggtctgagagactgtttgttatgatttgtgttcctttgcatttgctgaggagtgttttacttccaattatgtggccaattttaaaataagtgctatgtggtgctgagaagaatgtatattctgttgatttggggtggagagttccatagatgtctgttaggtccacttgttccagagctgagttcaagccctgaatattcttcttagttttctgtcttgttgatctgtgtaatattgacggtggggttttaaagtctcccactattattgtgtgggaatctaagtctctttgtaggtctctaagaacttgctttatgaatctgggtgctcctgtattgggtgcatatatatttagaatagttagttcttcttgttaaattgatccctttaccattatgtaaaggccttctttgtctttttttatctttgttggtttaaagtctgtttcatcagagactaggattacaacccctgcttttttttttctttctatttgcttggtaagtatttctccatcactttattttgagcctatgtgtgactttgtacatgaaatctgtctcctcaaaacagcaaascaatgggtcttgactctgtatccaatttgccagtctgttcttttaattggggcatttagatcatttacatttaaggttaatattgttatgtgtgaatttgattctgtcattatgacgctagctggttatttcacccattagttgatgcagtttcttcatagtgtcgaaggtctttacaatttggtatgtttttgcagtggccggtatcgttttttcctttccatatttagtgcttccttcaggagttcttgtaaggcaggtctgatggtgaccaaatccctcagcatttgcttgttgggaaaggattttatttctccttcacttatgaagcttatttggttagatatgaaattktgggttgaaaattcttttctttaagaatgttgaatattgtcccccactctcttctggcttatagggtttcagccaaaagatccactgttgtctgatgggcttccctttgtgggtaatccgacctttctctctggctgcccttaacattttttccttcatttcaaccttggtgaatacgatgaytgtctatcttggtgtttctcttctcgaggagtatcttagtggtgttctctgtatttcctggatttgaatgttggcctgtcttgctaggttggagaggttctgctggataatatcctgaaaagtgttttccaattcggttccattctccccgccactttcaggtacaccaatcaaatgtaggtttggtcttttcatatagtcctatatttcttggaggctttgttagttccttttcattcttttttctctaatgttgtcttcatgctttatttcattaagttgatcttcagtctctgatatcctttcttctgcttgatccatttggctattgatacttgtgtatgcttcacaaagttctcatgctgtgtttttcagctccatcagtcatttacgttcttctctaaactggttattstagttagaaattcctctaaccttttttcaaggttcttaacttccttgcattgggttagaacatgctcctttagcttacttgttattacccaccttctgaagcctacttctgtcaattcatcaaactcattctccatctggttttgttcccttgctggcgaggagttttgatcctttggaggagaagagcctttctggtttttggaattctcagcctttttgcactggtttttcctcaacttcgtggatttatctacctttggtctttgatgttggtgaccttcagatggggttcctgtatggaagtctctttttttttttttttttttttgatgttgatgctattcctttctgtctgttagttttccttcttacagtcagggccctctggtgcaggtctgctggactttgctggaagtccagtcaagaccctgtttgcctgggtatcaccagtggaggttgcagaacagcaaagattgctgcgtgttccttcctctggaagtttcatcccagagaggcacccaccagatgtcagctggagctctcctgtatgaggtatctgttggcccctactgggaggtgtctctcagtcaggaggcacaggggtcagggacccacttgaagaggcagtctgtcccttagcagagcttgagcggtgtgctgggagatctgctgctctcttcagagctgtcaggcaggaacgttgaagtctgctgaagctgtacccacagtaaccccttcccccaggtgctctgtcccaggaagatgggagttttatctataagcccctgactggggtttctgcctttctttcagagatgccctgcccggagaggaggaatctagagaggcaatctggctacagtggctttgccgagctacagtgggctctacccagtttgaacctcctggcagctttgtttacactgtgaggggaaaaccatctacttaagcctcagtaatggcagacgctcctctctctaaggtcaagtgtaactgtttacttcagactgttgtgctggctgtgagaatttcaagcccgtggatctcagcttgctgggctccatgggggtgggatccactgagataaaccacttggctccctggcttaagccttcttttcaggtgagtgaatggttctgtctcgctggcattccaggtgccactggggtgtgaaaaaaaagctgttgcagctagcttggtgtctgcccaaatggtcacccagttttgtgcttgaaaccctgggccctggtggcacaggcacccgagggaatctcctggtttgcaggttgtgaagaccgtgggaaaagaatagtatctgggccagagtgcaccatccctcagggcatggcccttctctgcttcccttgggtaagggagggagttccctgacttcttgcacttcccaggtgaggcgacgccccaccctgctttggcttgtcccccgtgtgctgcacccactgtctaaccagtcccaatgagatgagcagtgtacctcagttgaaaatgcagaaatcacccgccttctgcgttgatctccctgggagtagcagaccagagctgttcctattcagccatcttgccagccrctgtcgatttgtcatctttttaacatattcatctctctcttattaaaaaggaaaacatagaaaccaacaacaaactccccattgccccacatctttccaactaccrttgggagagtcaagagggatatttacatgctctctgaattgagggttgagagctctaggccaaatactacctctagtgtackagaagtagtaataccacttctaggccaaatttgggcttccattggtgggccttgagaaattgtaatatcctgaagtaattgggattttgtaatttgactaacttataaattgacttacaaatgggaataatttgaatttgactttataatttgagtcaagggccaatatatattttgattttgtaattgggattttgtagcttctggaagtttcaagagatgtctggctgtgactgcaaagccagcaataaaccagggtcatattgtttaagaaaagacacagtttaagaaaagatcctttatactcattgcatccttttcctcacctccctctcacttctccatgctgccattctattagacacctccagcccttcattgaaacatctgctgactccttcactttgggcttctagcctccagaactgtcaaagaataaatttctgttgttttaagccactcagtctatggtaatttgttacagtagcactagaaaacaaatacagaatctgtgtttatcattccctgtatcttcccatttccttgattctcttctctctcctgacttagtgggagtgcttcttctccactctttatgtgtctrctccactgtcctttagctctctctccacattactaatgtggtgcttcttgtttatgtaactcatttggaacttagcatgcacatcctgttttgttctctgttttatatgcagagactgctttctaggttagatttgagtcaagaaatgcagadgtcaaaattgaagagtgaagctttcttctttttttttcttctctttctcttctctcccaagtagctgggattacaggggcatgccaccatgcctggctaatttttgcaattttagtagagatggggtttttccatgttggccaggctggtctttaactcctgacctcaggtgatccaccctccttggcctcccagagtgctgggattatgggcatgacccaccacgcctagccggttttgaatctttacctcagcatcttaatagttattcttaggaattaaattcactaatatatttttagtcttgatttcagtgctgaattacattggtgttgattcatatcaatttctatttcactgttgtaaagtactgccaatcaaaacattttgatagtgaaattgacatacactaaaatatgctaagacatattcaattgaaatgcattttttttacaattcatttttataatatagccttcagtgttttccctgtcatatacattggaaataataaaaataatcataagtcttattttatagatgaaaagactgaggcttagaatgaatgagcaattttcccatgatcacatggctgataatttacagatctgagatagaattcagcattatctcgatccaaagttctattatttcctttatcccatgatctgtttaaacactgtattgaaaagttaaataataatgacaatgctaatagctaacgtttatttatctcttacaatatgccaagcaccttatgctttattctattcaatcatttaatcctcatagtaactctatgagttattattaacttttgaaggagtagaggccttgtgaaggcaagcagttatgaaagggttaaacaaagattactaatgtctgatgcggtttataggtggggaggatttagcacctatttattcctctgttctccttatcaacatttatgcttaaccttttttagttctttattgatacttttttcatctaggctttggtgtatttagtttttctttttgccagttatttttctacctcatttggaattcactagtcaactataaatgctaatcagcaatgaatacttaaatagagttggaataaaacaattgaaaactggtcacttgttagctrtttctaactaccttgctgtgcctttgtgtctgcttaaaaactataggaactctttgacttgaattgttattgctatgtgatcaactttcaatacaacaaatatactagaaagagcttcaaggctcttggagcttagtaacatattttattaattgaatgtgtataatctatgtacgtgtgtagctatatattttataagtacctgtctacatgaaattgaagcatatgtttttaatgctaataagttttcaaaattgtattactattcacatgctataagaactatgatgacttttaagaatgagaatattgctatatatatataagttctgtggaaattttattaactacgttaaaatatgtgtaataaaactttttatacttatttggcttacttaattatgccatttctaatgctttgatttgttgtgctttagtaatttgatatgaaattttggagaaataattcaaagccctctgattctaagtccttatataaaaccatttgtcagtttgaactttcaggtgtataagacctcaaactatagttcttgtaaatttcaacttcttcatataaagataaattcatgattagagactttaataatcttagatttaccaggacagttatatttaatttattccataaacatgcaatattaatttattgcataaacccacaataaaattatttttatagacacagaagaaagatgatgataagaagccatacattgtaagacatttaggtaagcttttttaccaaaataagtcaacataatatgtgttatttcttacttaaataaaaatattaagccattctttaactctgtattactttatctgktacacttatggagaatattattccacatgaaactcttgcatgtacttttcctgctgcacatatgtgatttagttcctctctgcattccaggagatttcaatgaattatttgccttgatcagcaaagcagaaatattacttatttctacacatgttatctggagtctttaaaccacatacatcatgtattattcaatcaacatcatttcagaatgaatgggcactaaatcagcacttgaaatctggacattgtttgcaaattaccaatttcagataatatcttgattagattaaatatttcccaatatataaattttaatctctctttttttacttgctagactttctatgtgtctttcaggctcactcaggtcattcacagttctgtttttcctttgactggactaagctccagctttgaatccaagtggtgcagttaacaaggaggagcaagaaagcaggacaaataaagcagagagctagtcaccagagggatgtgtttgatccagcacaccccttctcttcatagcagagaatcgacacccaatcaatcacagcaaaggtgctcactgtgcctgacatttctattctacctaaaattaatcagcattgactgagcatctccctaggycaggtactaagctgggtccagtggagtggcagttataagatatgacctctacccatgccagaagcagtatggggctgtggtgatggcatgacttttgggacctggcagaccctattccttactagttctgtgtgcttgcacttattatttcattgtttttttttttttccttagtttcttcatctgtaagatgaagaggaataacagcaccattttaaaggactgtttagtgaataaatgaaataatycatttagagtactgatcacagagtttagcaggtagaagcaccctcctaaatgttagctacaattattattcacaaaaggaagctcactgtctctgaagaaaagacacacaggcagtcaagtctacctatcagcctggctgggaagtgtcctatcacaggggtcagttagtgctttaagagtagagacagaggtgctatttggaatgaaggacttggggaggcatggtagaggaacaggcataaaacttgttttgtctttcacaaaaactggatcatataatacaaattactgtgtagcttgctttttatagttagtgatttatgatattaatactgccaggttttaagatataattttttttttaagacagggtctttctctgttgcccaagctggagtgcagtgcacaatcatggctccgtgcaacctctgcttcctgggatccagtgattctcccacctcagcttcccaaatagctgggactacagtcacatgccactatgcctggctaattttgtacagacgactttttgccatgctgcccaggctggtcttgaattcctgagctaagtcagtcctcacacagtggcctcccaaagtgatgggattacaggcatgagccaccacacccagccccctgtttttaaagaaagatccacttagcattcaaaatagggagttatctttccatcagtagctcttttagggcaggcctggtggtgacaaaatctctcagcgttggcttttctgtaaagtattttatttctccttcacttatgaagcttagtttggctggatatgaaattctgggttgaaaattcttttctttaagaacgttgaatattggcccccactctcttctggcttgtagagtttctgccragagatcagctgttagtctgatgggcttccctttgtgggtaacctgaccgttctctctggctgcrcttaacattttttccttcatttcaactttggtgaatctgacaattatgtgtcttggagttgctcttctcgaggagtatctttgtagcattctctgtatttcctgcatttgaatgttggcctgtcttgctaggttggggaagttctcctggataatatcctgcagcgtgttttccaacttggttccattctccctgtcactttcaggtacaccaatcagatgtagatttggtcttttcacatagtcccatatttcttggaggctttgttcatttctttttactcttttttcattaaacttgtcttctcacttcatttcattcatttgatcttccatcactgataccctttcttccagttgatcaaattggctactgaagcttgtgcatscrtcatgtagttctcatgccatgggtttcagctccatcaggtcatttaaggccttctctatagtctttattctagttagccattcatctaatcttttttcaaggtttttagcttctttgtgatgggttcaaacatcctcctttagcttggagaaatttsttgttacagatcatctgaaaccktcttctctcawcttgtcaaagtcattmtccatccagctttgttccattgcgggtgaggagctctgttcctttggaggagaagaggcaytctgatttttagaattttcagcttttctgctctggtttctccccatctttgtggttttatctacctttggtcttttgtcatggtgacatacagatggggttttggtgtggatgtcctttctgtctgttagttttccttctaacagtaaggaccctcagctgcaggtctgttggactttgcyggaggtccactccagaccctgtttgcttgggtatcaccagtggaggctgcagaacagcgaatattgcagaacaggaaagktgctgcctgattcttcctctggaagcttcatctcagaggggcacatggctgtatgaggtgtcagtcggctcctactgggaggtgtctcccagataggctactcaggggtcaggtaccyacttgaggaggcagtctctctgttctcagatctcaaactccatgctgggagaaccactactctcttcaaagctatcagacagggacgtttaagtctgcagaagtttctgctgccttttgttcagctatgyccagcccccagaggtggagtctacagagtcaggcagggctccttgagctgcgttgggctccacccagttcaagctccctggccactttgtttacctactcaagcctcagcaatggcaggtgcccctcccccagcctcgctgctgccttgcagttcgatctcagactgttgtgctagcaatgagtgaggctccgttggcatgggaccctccaagccatgtgcgggatataatctcctggtgtgccatttgctaagaccattggaaaagcgcagtattagggtgggagtgtcccgattttccaggtaccatctgtcacagcttcccttggctaggaaagggaattccccaaccccttgtgcttccctggtgaggcgatgccccaccctgctccatgggctgcacccactgtctgacaagccccagtgagatgaacccggtacctcagttggaaatgcagaaatcacccattttctgcgtcastcacgctgcgagctgtagattggagctgttcctatttggccatcttggaacctcctccagaagttttttaaagtaattaaaatctcaattatagtacctttaaattatttcacaattacatatacatgttggcagctcgaatctttcattacaattttttataaggtaaaaaagtaataaaatcataaatctcatcataactgacaatctcgatttcaggtttctataaattgttaaagaatgtgattggcattgttgaagaaattattaaataaatttgattttcctgcctctattcaagactttcaagaatagtatgtaaagaaattacataatgttagtttgaaacagttatggttcaaaaattaactttagttcttcaactcttttcagatccaggtttctgaggtgaacagcctgttttgtacatttctatatctttctctatgctcatatcgacctatataccaataaataagaattttaatttgtttcattttgtctttcacaaaattggatcatataatacacattattctttaccttgctgtttatactttctaatgtatcatattaatttytctaggttttaagatataatttgtttttgcttttgtttttgacatgrggacttgctttgttgcccaagctggagtgcagtggtgccatcatggttcactgcaacctgtgccttctggatgccagcaatcctcccgcttcagcctcccaagtagctgggacaacagttgggtgccactatgcctggctaatttttgtgtttttttgtagagacaggtttttgccatgttgcccaggctggtcttgaactccctagctcaagggatccacctgccttggctttccaaagtgttgggataatgggcatgagccaccacgcctggccccctgtttttttttttttaataagatccacttaccattcaaaatakggagttatcattccttattctgtcaatcaaacagatagtttaaaaatttttgtttcttctacaagtaaggctgcggtaagtagccttgtttctgtatcctttcacatagatacttataattatggagttgattcccaagtgtgatattgcttgggacatgcattttgtaaattttaataaatatcacaaatttcttgtcagaaacctaggacagtgcacatttctaccaacagtgtaagctaataggtaagcagtaatatctcattttgctttattttgtattttttgaccactaccaaggctcaatggcatttaatatgctttttggccattttaatttctcctcctatgaatttccatcattgttcattttctctttgagtcgtctatttttaaatagaaaagcattaggatttggctgggcatggtggctcacgcttgtaatcccagcactttgggaggctgagacaggcagatcatgaggtcaggagatcgagagcatcctggccaatatggtgaaaccccatctctactaaaaatacaaaaaaattagctgggtgtggtggtgcacgactgtaatcccagctactcaggaggctgaggcaggacaatcacttgaacctgggaggtggaggttgcagtgagccgagattgtgccattgcactccagcctggtgacagagtgagactccatctcaaaacaaagaaacaaacaaacaaaaacactaggattttagaaagatctttttttggtcaatcatatatgtgaaaatattttttccttatctatatttttagtttatgtgtttataccaaaatttgaaaattttctccaagctcagaatttcattttaaatactttcatgataytattgaagtcaatcccctactttatttatttatttatttatttttatttttttgagatggagtctcactctctcaccgaggctggagtgcagtggaatgatctcagctcactgcaacctccgcctcccaagttggagcgattctcctgcctcagcctccctagtagctgggaccacaggtgtgtgccaccatacccagctaatttttatatttttagtagagacggggtttcaccatgttggccaggctggtctctaactcccaatatcaggtgatacacctgcctcagcctcccaaagtgctgggattacaggggtgagccactgtgtatttgtatttatatatcatgaaaactcaaagaatcaaagcaatatattctcacaaccatgcacattttctccctgtcctcttcagccctgtgtctgtcactcccataatcctgtttcagcaactatgaaggcacttctgtggaatacttgattacagacctatatatatatacacattcacttaactttataaaccacttgccccatagtaaaaatttctttacctaatatttgttaaagtcttgaatagaggcaggacaatcaaatttctttaataactctttaaagaatgtcaattacattctttaataatttataggaatttgacattgagagcttcctcatgaattctattgtcatgttgtgtttgtattccaccaaaattcacatgttgaactctaattcccaatgtgatggtatctggaggtggggcttttgggaggtgattccaccctcatgaatggggttagtgcccttataagaagagacacaaggtgatcattcagtcagtcatgtgaagatacagagggaaggcrtctgtctacaggccaggaagttggccttcaccagccaccagttcttttggccccttggtcttgtactctccagcctccataatggtgagaaataaatgtctgttgtttaagccacccagtctgttatgtttagtatagcagcccaaacttattgaaacatgatggtagacagaattctaagctgactcccaagattccagctccctggtatacatgccttatatgatcccttatgcttaaatgagtatgaaacctttgaatatgatgggaaagccactccatggattaggttgtgttacagaacaagtgctgatggaatagtcacatttgtgattatctgacattatataagactctgttgtgttagacttgaggggtttgtgagtcaatatgttgggagcatgagagggtgtgctgagggagccatgctgagattgttcccaggttgacggtcagcaaraaaccagaagcctcagtcccacagctactgggaactgaattctggcaacagcaatgtgagccagaaagagggccccaagctccagaaaggaacacaggccagctaatactgttgacactccagttggagcaactagttcagctstttccagatttttgacctgtagaaactgtgagagaataaatggtgttcattcaagccaataattgtgtggtagtttgttactcagaaatagaaagctaacatacgtgtgaagaaatgttttatacaattaactcccttcaactgtgtttatwttttcaagtacatttcacaaatttggagtaaacttttatgtgtactcaagggagatgtttagaaagggttatcttcgaagagacgcttcagaaaggagagagaatttggggaaccttttccatgatttgaagaagacgggtgagtagagatgggaatgtcacttgggataagattttgacttgtaggaaggcatggaagaaactgaaaatgtgatactacatgctaaaattatttaaaaatgaacaattcagtttcaaatcgaaaagattatagaatagaaacaaggtctagcataatttatgaaagattatgatgtatcatttaaacatggtataatataatttaaaaagtcctatataccagatattgcctaaaattatgtttatttctactccggatatgaacattaaggagttttaagtagaaaatttaaccaacagttatggcagttatgaaaagttaacaaagagactgtaagaactccattattaattggcatcacatatctttgttccacaaagatgactaagcattggtcctgcaacaattgtacctcccatttttagctccagactgtataaacaactgcatttgaaaatcctagaggaacttcaaactcaagtccattttcctacttaaccattgctatggcttgaatgtctttctccttcaaaactcatgttgaaatttggttgccattgtaatagtattaagaggtggaacaacttaagaaagaagtaggccaggaggctctaccattatgggtggggttaattacattgcaaaaagatgaattcagcctctttttgttctctctcttatcttctacaatgtgatgatgtagcaagaagcctctcaacacatgttggcacctccatattgaaattcccagcgtccagaactgtgaactaataaatttcttcattgtaaatcacccagtctcagtctcaggcattctgttatagcagcacaaaacggaataagtcaaccatcttcaccacaaatacctgataatgtcttgagatcacaagttggtgaaaggaccaaccatccacaccaagttgtcaggccaacattttggaattagcctcctccctatcccttgtctctctctctctctctctctgtctctttttttatctgagacggagtttcgctctgttgcccaggctggagtgtggtggcgcgattttggctattttactttatatctaaggtctttcataatatgaaatagaatgtagatattgcaacaagtagcatttttggagacagctgtaactcctttaccaggaataacctttgcatgtcacatttagagataaagctcaaaatgcaaatctttcccctgagagtgggaaagcattaacaaataggcaccacaagtctttacatattcaaaatattaaactaattctaggattgtatacttgatttaagacatggtagttaatagaaaagttctagactgaaaacaattttgcaaaaatatacatttgtatatgtgtgtatatatatgtctatatgtctatctactaggaaaatatattgcttaaggtgtttgtgccatttcttagttaccaattttacattctgtgttcacagcttttgccatcccatctctacacttaaagccaccatattattttgaatcactttatacccattttcaattatctaaataatcgtttatagccataaactaatactgtttagccaatgaagcactttcatgagcaaaaattatagattttttgaacataattccaggaatagttcagtttttgcaattagtaattgtaccttagtcatatgaagcatgaaatcagctattatttttaaaaatcaattgtatattgaccataaagacatagtataaatgtcagaaaaacattctccttcactgtaagaaaacatgtgacattttatttgagttcctaagaaatttcctggatttacaactcttggactttcaccacttgtaaatatgagtatatcctttaccctactacagcttttaccctaggaattcggtatattttattaaaaaaaaaaaaaggcgaaaatgccgacagtgaaaattgagatagatgcaggagactacaagcacaatagcccagcatgtgtatattcagggcaagtgaagggtcccctccactgggattccatgactaaagattatgaagataccaaaaatgcaggaagtcataggaaatagcttttctcaatggcaaagatgacacaagtagaatggttaagaaggaaggtttattggcttcaattccccagctgatgttcaacactttatttagttctcatttggattttaaacatttgcttgaaaaataattttacatcaatttccatttctttggaaagcccccaaatgtaatttattgataaaatctgtgatgagcagaattaatgatatttcccagctgttgctccagatcatgtagggtagaggaggctgaagactgccacaagggaaaacatctgtattgtctcaaaacatcagaatggtacggatactgcaataggaaagaagagacattgtattagcatttagacatgcttccatgtgagagtccaaggagcatttgaaatgacttagtgaaaatctgtctgttctcagccactctaatcccacccccatgcattcgggtcaagtgaagtcaaaggaaagctcatcttttttggttttctcttgtgttttcttcaactttaagctcactcacaacattctgagtatgcctgtcatttagacttcaatactacgttagcatcttcaaaaaatcattgttgtgtgcccacgttcctgttataataaggaatataaaacaacaatggataataacttgtgataagtttttgctatttgtcacattcttcatgcattttctgtcttaaacttcaacctaaacatcaacactaggaggtagattttcatattattttgattttagagattataaacactgagacttagaaagatttgtaacttggtctggtcgcatatctagtatagagttttgggattaaaactcaaatacaaatttgcacaaattataagatgataaataacttgcctgaaagaactgataatttaacaaagttaaaaccatgctggaagtttaaaagacctttgatacagatatgtttaaggatttttagaagtagagaataaagtcgatttgtattaattctaagatacttcattcttgtgaagattacaaaaggaacatttacactagaactaatgccctttctataaaccaacttctcatgaataaatatttttagaaaatgatggtctttgtgactctttaataatttttaaaatatatatgtatttgcatatgcatatataagaaaaatatatgcacataattcagagaatacaagacagcagaaagaagaaagtaaaggtaatccataatcccccaacctagaaacaatcattctcaatgtttacttgaatttctatcaacttcttactaggcatatgtacaagttttactgctgttgttgaaaatgtgcgatattgtatataaaatttatattctttattatatgagcctaaattatatcatgagaatttcccaataatgtcatttctttttgatggcttcattcatttctaatagatgattggaatttattaaatcattttcctcatgttgaaatttagaatgtttctaatgtttgatattacagaaacaagtaaacatgctgaaacacatatgtgtgtttgaatagttgattatttctgtagaatagatttctagaaatggaattgctggaacaaaagatccattttttttaagggtttctgatacatattaccaaattgctttcccaaaaggatgtatcaattactactgaaagtacatgaaagtgcctagtcaccttagtcttaccaatattgagtgttacaatttttaatcttattgataggattaattatatttacatatgcatattactatatgacattctcataaagtgaatttaggcatgcttcatgacttcttatgttgctcaacactatcttctggttttgttcatctctatatttgccatcatcttttcaatcctatgatgatgatgatgatcacgatgatgatgtcaatgataatgatgacaatgataactaacctttgatggctactgtgttccatatatccatgcgctcttgaggggcggtgtggtttaatagaagtgagatatttgctaacaacaagatctacctttgaattctggctctccttcctaccatctgatgattttgaccaagtcatgccttctctgagtctcagttttctcttctctaagatagtgagattgagactgacaccgagcattgcctgggaatcacataagataatgcaggtaagacacttagtagaacagctggtgctctgtgggtgctagtttctttccctcctcaagaatgttgtcggttaaagtatctactataataattttgtgagtgccaaagaaacactattaaaagttgaaaatctcgtgaaaataagaatgggatagcagaaaagtctcagactctggagctagaaggcagaagttagatataactgcctgtttccagttgtgcctcatgtaaatgcaggtgacaaaattcattttattagctggttgtgagagttaagtgttagagacaggaaatagaattggcttagttttctaagcttcagacaaaaagtaagccaaacatttacaatagtgtttagtatacttctcttttataataacttttattgataaaaaaatttttgtaaactgcaaaagaaaaaaaaggaaaaagaaaaaactagtaatatctacttagaaaacaaactaaatatagtttcacatactccaataatgaaaatgttgaggatgtcctgaaaattatttaaatatacagccacctaatgtcagttttatataggtggtaggcagaggcttcaatgacaccatgttataattatggttatttaaaaagacttttttttttttggcaaaggtgattgttctcttttaaagaaggctgagtgtctctgatcattcggatttgctgtaatcaacataatttggcttcagcacaataggaaatgcaaagcaactgtttttagcatctcacagaggttttaaacttctcttacaagctctccatgtaaagactgaactggtaatggaagaaccaaggcactctaatttttctcatccttccaccttttcattttctgctagacaatcccctatggtagaaaaaaaagcaaaacagaaaactaactaaaaaatctaccttttcccagagtgaagcaggtcaaatccttcatttattttttcaaaaggtaaaacatgggttattaatgcatccaatgaaaacttcttagccataaaatcagccacaagttttgggacacattctttacttttaaagcctgaaaagaagatggtatcattgttagattcaaccagggtaagtaggagaattgaagagaagattttccaaataaatgaaagtttagaaaagatgctgcttccagactgcaacgactgaggttaataagagatacagtacctcaataagcttttacaggctcagacttaaaaaaaaatcacagataaacaagggtccctggttattctctctcccacagagaaatcatagtacagatgttatgcccaaaggaacaagtttaacagttgtctaaatttgggtgtagatatgaaatattgttgtagatttctgtgtcttactagaaattcccatgccttacacagttacaagtacgaaaacagatgaagaggaacagactttgttaatggtggcatcagaaatgtcgattttgggaccttctgcctgcattagttccatatctagttgatttggagactgtagatagaaaaggaattttaatttgtttttgatctgcttttcaaaaccttgccttgtcacttgtaaaaggggagatatgctgaggttaatgagaatttggctctgaagcctaactacataccaccaagaatagctcccttccaggtacgtccagtcagtagcagcatagggttcattgagaggttttgggaatcaggaggtacccctacgatgacacttgtgccacatgcctcatgacaacataacagggaagccatctggaataaagtgaacacttagcattcttaacatggagtcgcatagttcctattcataatgcacaatatcatgtaataggcttaactggattgtgagtgtgtagagggaagagattatgtcttttgctccttcagtccccttttttgcacgggatagtgctgtggatttaggaaatgcccagaaaacggttttttaatgaaagaatggatgaataaattggagtgcacttaatttttcctaataaaggaataaagtggtagatatcatcacaaatatatattaagtccagttccttatataagcatacaatttcatcatcacataattcttaggcaatctgtgagttggttaattcatttttcattgatttattacataggtattttgaacccattactttcaaccacatattttaatgggaaacaagataaatgattatatcaccaaagtagtctcttgtccacttgatggtctccttttgtaatggattcctgttctactgtccatttctcaaatggacatgttttaaacattgtttttatctccccaaatatatataggttttacattaaaataccctgattattagggaacctcaaaagaccgttcagaaagtcttttccagtgagctttctgaacatgttctatagttagaaaatggtttaggattgccccaagatatgtaatgattagttctttgattttggattctgacctttgggagaccagacatcctcagaacatgtggctgtcagatatttggtatcttga

SEQ ID NO: 97398 - DNA, 16129 bp, Homo sapiens
aaccgtatataaatttttactaaaagctgtaatatttgactaaaacataaatgctgagaaacacccacaccaacagggaagggactctgcgacgtgtttggtttgacttgcctaaaattaattattgaaaacacagaaaattggcctggtgcagtggctcacgcctgtaatcccagcactttgggaggctgaagtgggcggatcacttgaggtcaggcgtttgagaccagcctggccaacatggtgaaatcccatcccatctctactaaaaatacaaaaattagccgggcgtggtggtacatgcctgtaatcccagctactcaggaggctgaggcaggagaatcacttgaacccgggaggcagaggttgcagtgagccaggatcatgccactgcactccagcctgggtgacagagtgagactccatctcaaaaaaaaaaaaaaaaagaagaaaacttacaggaaacaaattatttttgccagttaatctcaataatgggaagggaaagcaggctatgacattcatttatttgtcaacaaataatcggatgattaagaatgacacccattacaaaattagccaggcgtggtggcgcatgcctgtaatcccagctactcgggagactgaggcagaagaatcacctgaacccaggaggtggaagttgcagtgagccaagatggtgccaccacactccagcctgggcgacagagcgagattctgtcgcaaaaaaaaaaaaaaaaacgacacccatttcatgcatgctatgtgccaagcaatttgcaaagtgttttatatatacacagattgtttcactaattggtcacagcaatctccatgagataagtgctattattatccttattttacatggagatgggtggtaaaaagagcattggagaggtcaagtaacttgtcctagatcacagagcatgtaagtgatagagtcaggatttaggccaggtcagcctgactccaaaactgctctgcttggccagtatgctatatcgcctatctaagcacctgccatatttcagacactgtgctaggtgttacatatacaacagtgaccaagatatagctcttgtcctcttaaaccttacagtctagttggaggagacagactactaaacagtttagtatagccctctctgatattccttggcttggttacgtataaaggtaatcagtaaaggcaaatggtaaataccaatatcctgaaatatttcaattccttttgtagatcctcagagcaaaggcctctcccctccatgtatcatgaatgtccctaacagtcacaaatggacttgaggatatttacatgttcctccattgtgtggctctgggccacatgtgggcactgccaccctgcttagtctcctttgaagagagacaatgagaaacaatgtggaaatacatgtattaatgaaatagaatcacctgatggaaaattgttaagtgtcagacataatagctgtatttcatttcaattgtccttttgcactaacattaattggcaagtactaagggagcttcatgactgcactttatgggcatgccattttgaaatatattccttaggaaagtgacaatgatgcccctgtaagctataaatttccaatgtgattttgaagataaagggttggaagacttacatctcaacaaatgacaatcatcttctcccttccagcccaaaaacaatcaaagggcattatctaataccataatactgtacttctcaatgctggctgcatatgggaatcaccggggaaattttaatattaccaacgcctgtgtcccacctccagtgattgtgatgactcagctggtctggacatggtctgcacttggaagtttggaaagatccctgggagattttaatatacatacaagtttgggaaccacagcccttatcagaggatcataaccctgactgactgcaaattagaatcaccttggggatcttttaaaaattcagatgtttgggccacaccccagaccaattaaatcagaatctctggaggatcaaatcccaggaactaggaagttttgtaaaaagatccctcaggtgattccaatgatgtgcagccaaggctggaaaccaccatagtaggtgaaactccaaatctgaaaaggcaatgacaaaatttgcactcattggttcagcaactctaagatgagcctaatgagaagaagcctgttctagaagaggagtgggaatcaggctgaggataactgttctactttaatattaaaatgagttcacttttctctcacatgtatgagagttaattttttttttttttttgagacgaagttttgctcttgttgcccagcctggagtgcaatagcgcaatctccactcactgcaacctccacctcctgggttcaagtgattctcctgcctgagcctcctgagtagctaggactacaggcgcccaccaccgtgcccagctaattttttgtatttttagtagagatggggtttcaccatgttggccaggctggtctggaacttctgacctcaggtgatccacctgccttggcctcccaaagtgctgggattataggcgcgagccaccgcacccggcctgagagctaattttattaacttaggctaggaattataatctttcgctagaattactagtagctgatgataccttagccctactttctaccacaccccccaaaataatggcagaaggaatgagaaaggaagtgctttaaagaaataaaaacctttgcaaaggactgcaaaccagtgctcagaacacctgggtaagtctagaagagtagcaagcagaaagacaagctatctggcctatgtattacccaactactgtagttacgttttatctgcaacctggtgtgcacttttactcatcacaccaaacaccaggcttagagaccaaaaatccaaagtgattctcatccttggctacacaacagtcatctggagagcttttaaaataatgatgatagggctacacccaaaatgaattaaatcagaatgtgaagtgatgacactcaggaacttgtttttgacggtctccaggtgatgtgcaaccaaggctgagaatagttgctctgaaccagtggttcctaaatttgaatgcacaccagaatcacctgaaagacatgttaaattagattgccctagccccagtgtttctgattcagttgagggagagcccaaatgtgtgcatttctaacaagtttccaggtgatgccaaagctgctggtccagggatcacactttgacaggtaaatcttgactactggttcacaaccttgactgcatactagaatcaccgggcagggtggacagtaattttaaaaagactgatgactaagaccctccccaaaccaattaaattggaatgtctggggcccaggcatcaatattttttatatattttttgagactgggccacacgctgttacctaggctggagtgcagtggtacaatcatggctcactggagcctcgacctcccaggcccaagtaatcctcccgcctcatcctcctcagtagctgggactacaggcacacaccaccatgcctggaaaatttttttgtgtgtgtggagatggaggtctcgctatgttgaccaggctggtctcaaactcctggatgcaaacagtcctcccacctcagcctcccaatgtgctgggattacaggcgtgagtcactgcacccagcccggatcttggtttctaaacaccattctacactgaaaggaaccagggttcattggaaatggctggttccaggactagggcaaggaaaatgtaaagtgaccctgggaatcttgtgccagaatctaaggaagtactcaaatactaatggaggcatgttaagtgacatgagagccagctgaagggactcccactggtcaaactgtagaaaatttgagcatcaaaaggaaaataattgaactgagcttaaaacacggaattcaaataagcaaatcaccgaatcaagtgatattcaaaaaaaaaaaaaaaaaaaagcggggggaaacaactttgccactattgtgccagaccactgtcaactccaatttggacagaaccagattcaagaggccaaagaacagatccagagacagcaaacaagacatggtgtttttttgtttgtttgcttttttgtttttaactggggtcttacattcaagggagactccagtggtgatgggctggacggaactgcaaccacttgcaaatgcatggggtttatatagcattttcacctaacaccctccccctaacaacctgcagctggcaaccttcatttaaaccaaaacaaagggcctcaattccccgtatggcctgcatttcacgggacaggccaggagctcagatgttccccatagatcagaaatggatctctgggttcctgagctggaaactccctatcgcattcaggtgcatctgccatatggggccattctcaggctattgctatcttcagttattgctatcaggtgcatttaccatacagtcaccatagtaattattaggaagcaattattatactaacttcttgctctaaaaattggtattaaaagggaaagacttaggtctttacctggcttttttggaggaactctagttcataccctctagaaagggaaaagctcatttttataaaagagtgacagctggctgggtacagtggctcacgcctgtaatcccagcactttgggaggccgaggtgggtggataacctatggtcaggagttcgaaaccagcctggccaacatggtgaaatcccatctctactaaaaatacaaaattagctgggcctggtggcaggtgcatgtaatctcagctacttgggaggctgaggcaggagaactgcttgaacccgagaggcagaggttgcagtaagccgagatcgcaccattgcactccagcctgggaaacaagagcaaaactctgtctcaaaaaaaaaaaaaaaaagtgacagctaataaacacagaccgattgacagaattaggaaatcatggcttttcaatccccaattaaattattaatttaccatcagtgggtacacgaaaataaaaaagttagaaagcaatcatttgtttttgagacagggtcttgctctgccacccaggctggagttcagtgacacaatctggtcatggcttactgcagcctctacctctcaggctcaagctaatctcctaccccagacccccaagtagttgaaaatagaagtgcgtgccaccatgccaagcttttttttttttttttggtagagacatggtctcaccatattccccagggctgttctcaaactcctgtactcaagaaatcctccagcttcagcctcccaaagtgctgggattacaggtgtgagccactgcatctgaccaaaataaattaaaaaattaaaaaatattaaatgactgagtcaggaaacagtaatcaacggatgctaaaatctttagggaagaggctattgggaaacaggatagtcacatggcattagagtgacatccaatagctttttttttttttttctgagatggagtttcgctcttgttgcccaggatggagtacaatggcacaatctcagctcactgcaaccgccgcctcctgggttcaagcgattctcctgcctcagcctcccaagtagctgggattacaggtgtgtgccaccacgcccagctaatttttgtatttttagtagagataaggtttcaccatgttggtccaggctggtcttgaactcctgacatcaggtaatccacctgcctcagcctcccagagtgctgggattacaggcatgagccactgcacccagccaacatcccacagatttcttattaattacaaagaggaaaattacatggagagttctgagggccatcaacctaaccatcacctttactacaagtgagcaactgaaataatgtacctcctaatgggatgcaacatgaagtacataccatcactttaagttttgggggtgtttttgtttttgttttgtgttgttttgttttttgagacaggatcttgctgtgtcacccaggctggagtgcagtggcaccatcatggctcactgcagcctcaacctcctgggctsaagcaatcctcccacctcagcctcctaagtacctgggactacagacatgcaccaccacgtccagctaattgttaaattttggatttttttgagacagggtcttgctctgtcatgcaggctgaaatacagtggtaaaaccatggctcactgcagcctccacctcccaggctcaagcaattcttctgcctcagcctccaaaagtagctggaactacacgtgtgcaccactgtgcctggataatttttttattttttgtggagatagggttttgccatattgcccaagttggagaaaaagattttaaaactttccttcatgacactgtttttgggaaaacaacaacaacaacaacaacaacaacaaaccctcaaaaaaatgtttaaaactgatataaaaccctatcacacagaaaaaaaaaaccatattttggttctcaagatttggttctctacgttacccaggctgggtctggtcttcaactcctgggcttaagtgatcctcctgcctccacctgagccactgcccacagaccacttaagtattcttgtcaaaaatgtgttttgtttcgtttttgtttttgtttttttttgagatggagttttgctcttgttgcccaggctagagtgcaatggcacaatctcagctcactgcaatctccacctccygggttcaagcaattctccygcctcagcctcccaagtagctgagatcataggcgtgcaccaccatgcccagctaattttgtatttttagtagagatggggtttctccatgttggtcaggctggtctcaaactcccgatctcaggtgatctgcccgcctcggcctcctaaagtgctgggattacagatgtgggcaaccgtgcccggccatcaaaaatgttttaatgtgagtctaatcaagccactagacctaacttcaagtttataagaaatttaggtcaagaaaaagttaaacatgaacacacgtaaacaaaacatcctggtttacccaggactgaggggtttctcaggatgtaagatcagtgttcaaactaggagagtcctaggcaaaccaagacagttggtcaccttaaaatcagacaaatccataatgtggaacagacctggtttctaaaaagtcagtgccttgggtaaaaagaaaaagtgaggagatcattctagattaagagagactaaagaggccatacacggaggctcatgcctgtaatcccagcattctgggaggccaaggtgggtgcatcacttgaggtcaggagttcaagaccagcctagccgacatggtgaaaccccatctctactaaaaatacaaaaattagccrggtgtggtggcacacacctgtaatcccagctactcgggaggctgaggcaggagaatcacttgaactcaggaggtggaggttgcagtgagctgagatcgtgtcactgcactccagcctgggctgtgacagagcaagaccatctcccaaaaaaaagagatactaaagagacacagacaaaaccaccaaatgtaacatgtgaattggccataaaaaacattttggggacagttggggaaattgaatataaagcagtgctaccctgccagtccacagatgtaaatgaacaatgtcgctaagtcagtacactgtgtaattcagctgccttttttttttttttttttgaaaaagacttttttgataaagaatgtggtactctggcactctgggaggccgaggcgggcagatcacttgaggtcagtagttcaagaccagcctggctaacatggtgaaaccccatctctactaaaaatacaaaaaaaaattagccaggcatgatggcgcatgcctataatcccagctaagcgggaggccgaggcacgagaattgcttgagcccaggaggcagaggttgtagtgagccaagattgtgccactgcactccagcctgggtgacagagcaagattcccactcaaaaaaaaaaagaaagagagaaaagaaaaaaagaaaaagaatgtgggccaggtgcggtggctcacacctgtaatctcagcactctgggaggccgaggcgggtggatcacctgaggtcaggagttcaagaccagcctggccaacatggtgaaacccygtctctactaaaaatacaaaaatcagccgggtgtggtagcacacacctgtaatcccagcctctcagaaggctgaggcgagagaaacgacttgaacccaggaggcggagaggcggaagttgcagtgagccgagatcgtgctgctgcactccagcctgggtgacagagtgagactccatgtcaaaaagaaaaagaaaaagaaaaagaatgtggtactatgatacacactttggtataaactccttatctttttgtgaaacatcaggcagtctccagaccacacctcaagaagcactgaactacattagatgacattagtgaagattagtgaggtactgctaattttcttagttgaactcataatataatggttatgtagaaaaatgtccttatgcttagaagatagatgtataaggtatacatgtatctgtataccttatacagacagatgagggatctaaagatgaagagttggccgggcgcagtggctcatgcctgtaatctcagcactttgggaggctaaggtgggaggattgcttgagtccaggagtttgagaccagccttagcaagatggtgagatcttatcactacaaaaaaattaaaaaatagccaggcatggtagcaaacacgtgtagtcccagctacttgggaggctgcgataggaggatcccttgagcccyggagttcaaggtggcagtgagccatgatggcgctactgcactacagcctgggtaacaaagcaagacyctgtcttaaaaaaaaaaattatgactcactaaagactcagatgatttttagcatttttaaagcaataaagtacattttaattaaggtacatacactggttttttagatataatgatattgcacacttaatagactatagtataagcaatgtttatatgcactgggaaaccataaaattcacattacttgctttattgagatattcactttgttgtggcaatctggaaccaaacctgcaatatctctgagggcataactataaacaagtaacaaaattatgaggaagttgattttccatagccaatcctgtatttattcattaaatattccttgaaggaggaatatttaagttaaaaacagaaaggtaaatagagtaaaccagaagagttagggaaaagaatattccaagctgaggaaacagaatgtaaataggaccaaaagggaagaactttctccttttcagggaaaggaatccaatatatctagagaaatggagttcttcagattatgaagtggcttttgagcttcatcaataatgttggactttattttaaaagcaataggaagttggctgggtgcagtggctcatgcctgtaatcccagcactttgggaggccaaggtgggtggatcatttgaggtcagcggttcgagaccagcctggtcaacaagatgaaaccctgcctctactaaaaatacaaaaagaaaaaaaatgagccaggcatgatggcacacgcctgttatcccagctacttgggaggctgaggcacgagaattgcttgaacccaggaggcaraggttgcagtgagytgagattgcaccactgcactccagcctgggtgacagaatgagactgtgtctcaaaattactaactaaataaaataaaataaaagcaacaggaagccaatgacagattttaagtaatggagaaacatgagatttgcattttttcttaagagggtcttgctatattgtccaggctggtcttgaactcctgggttcaagcaatcctccagcctcagcctccccactagctggtatttcaggtgtgtgccatggtgctagaatgaactggggcaagagtgaatacaagcagcaacagttgtgaagatgactattgcagcaataacctggagagagatgatggaagcctgcagggatggcgactttgtgaaaaattggatgaggccaatagtacaggagaaggactcaaaaatcattcccagactctggcttgggtgactgagtaaactgttatattcattaagactgagaatagaggaggaagaacatgtttaagggaaagatggaaagcattcaacattagatatattgagtttgaagaatctagaagatatccaagaggaagttaccttataggtagttggatacaggaatgaaaaggaactctgttttctggcttaagtgattgatatagatggtattgccatttgctgatacagggaataaatggaaaaaaattgcttttttgaaaatttcattataaaaataatataacccatcacataaaatttaaaaataaggaaaggaaaaaatttatgcaactaccataaaccaacactttcggaggccgaggcaggtggatcacctgaggtcaagagttcgagaccagtctggccaacatggtgaaaccccatctctactaaaaatacaaaaattagctgggtgtggtggcaggcgcctgtaatcccagctactcaggaggctgaggcaggggaatcgcttgaaccgggaggcggagaggttgcagtgagctgagatcacgccactgtactccatcctgggtgacagagtgaggatccatctcaaaaaaataaaaataaaataaatctttctggctgctcctccttgggctagataattcttatagatagcaagggttcagctggaagatttctttgatatacaaactaaccaattcagagctatattccctctatctggcatggacaccccaagagacaacattccagtgtcctaatcaccccatggccaggtaccagacaactagggagcacccctataccttattcaaagtagccaatcctaaactgttcactcagccctgcattgcctttcccaaagaaactcaagtaacggcagtggcctaaaccttcccctcttctgtcttctgcctcctgcccaccctggtgtctttcccatgtagtcctatgtggcataatatgtctcctgtctctaggacctgtaagcataatagactttgttttcctgagcctctcctgtgtctcctcttgtggctatacctgacccaccatctaaaaaaagaatagaaaacattatatagtagctttaacagccatatttttctaagaaggaggcttctctagaatgtttgattgagaagaattaaaaataccagttaacctgatatcactttgtgaatcagacaacacttactaagttacacatccttaggcctttagattatcaaaacataatctaaattgttgggcaagtacccaagaacaactccagagttgatgaaatcatggactagagaatgttaaatacagtcagttttcaatatccagtttattatgttatactagattttggagctttttgcctccacactacacagcacaattataggtattcagtctctctgaaaatctcctttcccttagggtctctccaataaccaattcttcctccacgggtgagagttaattggtgctattgctcctagggataactacattttctttttttttttttttttgagatggtgtctcactctgtcacccaggctggagtgcagtggcacaatttcagctcactgcaacctccacctcccaggttcaagcaattatcctgcctcagcctcccgagtagctgggattacaggtgcccaccaccagggaaaactacattttcaaggggcattcgagatgccttaaaaccaagaaaacccaaaagaattaatctcatctgatgatcactcagtcaccctgtattcacttcatggcttaccctgcttttaaaaaacctcgactgtttctggttttaatccttaactacctcaagaatccagaagtcttagaaatatctaaaaattgtagcatctctgagcaaatgcacaggctccagtcaatgtaaaattattaccagctgcttaaaaaaggtcatttgtccacaccataagcagaaacggaggagacaagactataaactagaaccaaggctgacagcaacaggaagaaacagtccagatccaggagtggggagtggtcaaacccaagcaaacgggcatgattgaaagggaatctgaaatctaaggttaagtcagccgcggcggggtgtggtggctcacgcctataatcccagcactttgagaggccgaggcgggtggatcacttgaggtcaggagtttgagaccagcctggccaacatggtgaaaccctgtctctaccaaaaatacaaaaattagccgggcatggtggcacgcacctttaatcctagctactggggaagctgaggcacgagaatcacttgaacccgggaggcggaggttgcagtgagctgagatcacgccacgacactccagcctgggcaagagtgagactctatctcaaaaaaaaaatctgcctcagaccagaggcctaatagattcttcctattcacaaaccaaagattggtttccactgtaatgctcccagggtctgcaatgtagcaatatgccaaacctgaaagtttctgaaacttcagccttaacaaatagcctgctgtcttctaggaggctgcttatcgagtaaagaggagcaccagctcacaatgtggggtgtgagggaacaaatccacaggtacagcttgctgcaggacaaagggctcgcctaagagcttcttagcagggtctggaggacagcacagcctgtagaaacagaacatagcatcagttcccaggaataaaaggaagaacccacaggaatacaattgcctaaaatagaggcccttccactgtgttcccacaggccccctgtgtttctcttatacagcatttatcttatttaatataatcgtttttcttcaccatcttccttactgaattttaatctttttaagggtagaaatgaagtaaacactgcttaatattcatctctgggttcccagtatgtggcacagaataagggttcaatacatatttggtaaatggagctgaagagcctgtatgtttataaggccttaagatacataaccaccaaactgttctaaaaagggttgtaccaatttatatcccaaccagcaaagtagaagagtatttgtttgcctgggtaatattcaatacagtcatgcatcacttaacgatgggggtacattctgaaaattgcattgttaggcaatttcttcactgtgtgaacataatagagcatacttacaaatatctagatgacagagcctactacacatctaggctctatgctatagcctatttctcctcagctacaaatctgtacagcatgttactgtactgaatactgtagacaactgtaacacagtggtaagtatttatatatctaaacattaaaaagtactgtaaaaatatagtagaaaaactggtcaacctggacagcatagtgagaccccatctctacaaaattctaattttaatttttaactgattttaaaattagttgggtgtggtagtacatgcctgtacttctagctactctgggggctgaggccagagaatcacttgaaaccaggagttcaataccaacctgggcagcatagcgagactctgtcgttaccaaaaaataaaaaataaataaaataaggtccgggcatggtggctcatgcctgaaatcccagcactttgggaggctgaggtgagaggattgcttgagctcagaagttcgagaccagccggggccacatgacaaaaccctgtctctacaaaaaacacaaaaactagccgggcatggtggctcgcacctgtagtgccagctactcaggaggctgaggcgggaggatgtcttgagcccaggagataaaggttgcagtgagctgagatcacaccactatactctagcctgggacaggatcatcaatatcactgttttgcacctccaaatcttgtcccactagaaggtcttcaggggcaataacatacatggagctgtcatctcctatgataacaatgccttcttctggaatacctcctgaaggatctgcctgaggctgttttacagttaacttttaaaacataagtagaaggagtatctgctaaaataatacaagtatagtatagaaagtatataaaccagtaacacagtcattttattatccagtattatgtactatagataactatatgtacttaattttataagtggtgatgctggtgtaaacaaacctactgacagcacagtaagtttgtttacaccagcatgaccacaaacatgtaagtaacccatgtgctgaaatgttacaacagctatgatgtcactaggccataggaatttttcagctccattataatttttttttcatttattattattatactttaagttttagggtacatgtgcacaatgtgcaggttagttacatatgtatacatgtgccatgctggtgcgctgcccccactaactcatcatctagcattaggtatatctcccaatgctatccctcccccctccccccaacccacaacagtccccagagtgtgatggtccccttcctgtgtccatgtgttctcattgttcagttcccacctatgagtgagaatatgcggtgtttggttttttgttcttgcgatagtttactgagaatgatgataaatcatgctgctataaagacacatgcacacgtatgtttattgcggcattattcacaatagcaaagacttggaaccaacccaaatgtccaacaatgatagactggattaagaaaatgtggcacatatacaccatggaatactacgcagccataaaaaatgatgagttcatgtcctttgtagggacatggatgaaattggaaatttattatttttttttttttgagacggagtctcactctatcacccaggctggagtgcagtggcacagtcttgtctcactgcaacctccgcctcctggattcaagcgattttcctgcctcagtctcccaaatagctgggattacaggcacacaccaccaccacacccagctaatttttctattttagtagagacgggcttttaccacgttggccaggctggtctcaaactcctgacctcaagtgatccgcctacctcagcctcccgaagtgctgggattacaggcgtgagccaccgcgcccggtcagctccattataatcttatggcaccaacatcatatattcagtccattgttgactgaaatgttattatgcgacacaagactgtagtttaaatagcattatcccattataatcaaatacatgacaaaaatattcactatcacatctacaatggaacattttcttatgcaatataataagcaaaaggaaaaaatgagtattagaaggagagggacagaattatttttacatggtgatcatatggtcagctaccacaacaatgtgagaatcaactaaaaaatgaataaaactaataatagagtaaggtagctgtataccagattggcaataactaatgagaaaatgtcatgaaggctgggtgcggtggctcacacctgtaatcctaatactttgggaggccaaggcggttggatcacctgaggtcaggagttcaagaccagcctggccaacatggtgaaaccctgtctgtactaaaaatacaaaaattggctgggcgtggtggtgcatacctgtaataccagctactcaggaggctgaggcaggagaatcgcttgaacctgggaggtggaggctgtagtgagccgagaccatgccactgcactccagcaagatgagactccgtctcaaaaaaaaaaaaaaaaaaagaaaagaaaatgtcatgaaaagatcccattcataataaaaagctggccaggcacaatggctcatgcctataagcccaacactttgggaggttgaggtgggaggatagcttgagccccagagtttaagaccagctggaataacatagtaagaccctgactctacaaaattttaaaaattagcctggtgtggtgactcacgcctatagtcccagc

SEQ ID NO: 97399 - DNA, 22557 bp, Homo sapiens
aaggcacaagttaggggaagggaaggaaaacactctggtctcccctacccaccacacttactaggtgggaatgtagacctgtttcagtttgctgtctgcttcagcagctttcaaccttttctgtaagaaggtaaaaagaaagagaaggatcagagcctcatagcagggagaatgtcatcaacttcaaaggcagaggtcagcaggtagcctatggtccaccctccccagcccagataatacctgctgaatataccggtctgtggttttccacatgtaataaaactggactatgctggcaagtgacttccagggtagctaaggggggcagagggaggaagaatgagctggcatctggccccaggtcctggttccctcacctgtcatctctcccacttctcctcctagtgccatccacttacaaaatcctggcgaatatcattgaagtccttcccatacttctctagggcctcctcaaatagcatggcctctgaggctgaccattcctccatctcatcccgacacagcaccgggcctccctggggtaccagggtcgacatggccttagccaggtcgtagccgttcctttgcaaggtatccatggcgtgaaactatggggaagatggagagcaactgaggacctgaaacttttggcaccactcccttcctgctccttaaaacactcccactcccggccgggcgcggtggctcacacccataatcccagcactttgggaagcggaggcgggcagatcacgaggtcaggagatcgagatcatcctggctaaaacggtgaaaccccgtctctactaaaaatacaaaaaattagccaggcgtggtggcgggtgcctgtagtcccagctattcgggaggctgaggcaggagagtggtgtgaacccgggaggcggagcttgcagtgagctgagattgcgccactgcactccagcctgggcgacagagcaagactcctctcaaaacaaaacaaaacaaacaaaaaaaaaacactcccactccctcagagataccctcctcttctgttcccaggctctgcaagtccccagaaaacccagcctgcccaactacccaccaacttctgctcaccagagtgatatctcgggaggcagcagctgcactcatgtgcaagcttggctgccgaatggagctgctacaatctagggctcttgcaaaggttcccacagctctaagggagaaattgagaagtcaaaagcgaaagaaaagtcaaaagcccaagtgggctgggaaattaagccaaaggagaaagaaggaaaacatccatggcaatgaaagaaataaagtccatctctaagaaccatgggactcagaacaatgtccacacctcccccagcccatcttccctatccacccacccctcaccgggccaccacaagaaactggtcgatctgccggtctgtgagagggttgtctgggtcccagaccttcatctccatcttctgctggttccgattatcagattctcctggggaaaagaacaatggcatcaacagggagagggcaggggggaacagttggtgtcttttcattcacaatagcacctcctccttctcttcttctgcttggattctatcaactctccgacttctcttcccaactgttcccattttcccttttcaggttcctacaggcccattctgtcagggtcatggcagagagccctgcagacagtgcactgcacaaccccaggtgacgccattcacagagactataatgttaaagtgccccttggaattagacaacctggtagccgtacagtcttgtcctgttgcttaccctctactaggcgatctgggatctcagcttggtatttgcaaccaactctaatctcgccctgatcagcgagaagtgtcttctgcacggggtcaaacaccagtgagtaaaaaaagcagtcctggaattggggagagacaaggtaagcaaggcagcaatccacataggcggcggggagggaggtgtatctgagtttccatgaccggcagtctggcaaccctgtacctcatcattgtgctcctttccccctctcttttgcgggcaatacccattcccctcgctcttctctcaacatctctttctcacctccttttccaggtactggctcaagatatctgtctcattcaagagggtcacactgcatttccccctataggagagagattggaaaaccccggtgagccccactctccctccccacagcatctctcaataccacctccttctctccatcttctacgtaagtgcacgcaggctatgctggccccagttgtcctgtaccgtatgtgggtggctggtaatgattcaaattgccgagaaagaaaaagttcccggtgcttcagttgatggcgctgctgctcagacacccctggctgctttgattcctcttcaaactcccctgggagattaaagaggaagaaaccaagtcagaaatggatccagcaaaacaccaccctggaaactctaactcagggaaaatatttcctatcttggctgtttttttctcacatttcccaggcgtctgccttctatacccttatcccaccagctttccttcttagctctatgccccatcatagatgctcccaactctatcagtaatgcttttagagaagaactgctgagagtacgaagaatgctctagaaatacatcgctacccagctgccagtactcagacaccaaagtccacaacgggccagcaagaacatcacacttgtctcttgcttgctaaaccagcctgaggtccaggaactcaagatgaaaaaatatcacacaagactgtgtttaccagttcttttcaatttcaggagactctttgctctaaaacatcacatgcagccctaactatccctcattttctacttggctaataatagttcctggggtttccaaggacaacacctctcaagccagtgccaacaccttcctccccaaggagctgcagcttgccctgaaacctagcggaaggggttaacctggctaggcgccaaccaaagtgggagggagcagaagaacctcagccccaggctcattggtgtattgttcccaacctcagggagaaggggggggttgtgcagtaggctccacccctcgcttgtgtgctccggaaaccctgtgctgaggcaagggggaccacacccccaacaccccttctgattggacaaggccaaggtcagcccctgccagatggggctggaaaccctaaagggccaaggaacttggtaagctgggctcctctttaaccccttctcacccagagcagtctgaaaaaggaaaataatttagaaaggtggaacaaaaggaaggaaaaagaaaaccaaagcaggaaaggaaaaagaagctaaggaaaatatgttttttaaaaaaagaagatgagaccttaaagagaatgaagatagggcaaaatgaaaagggaaagatgtaaaatggaggggggcgggcggggaaatgggcgaggtgagaaattaaaaagcgcaagaaaacttccagccatcttctaacttccaggtactctcatcaccttgtgattacaaaataagcctgcttctctgttacgcaggcttctcagtacaatgtcttcctcttcacgttgaccttcagtcatcacctactgtctcaatgtaccccaaactgcccccctttagaaaaccattgtttctctaaagctcgtcctcatactctaaatgttatcatctctctcttactctcatatacaaaccatattatcgctttccttatcacaatctctccaccctgcttccaaccccaacatgtaaaaacaggcctccctcctcaggccaggcatttcccacccccaaactcacacctctgccttgggcatgctaccaggggaaatacctgcagggacatgcccaggcctcagatcatgggtaggagaaaaagaaagggaggaagatactcactggcattactatcagccaggctgttgaggctactagaaatgtccctgcgccggaaaagacagacaacctttgcctccacatttccatttgcagtctaaggggaggaaaaaaacaaaaacaaaacaacgtagcagtggaaattgatcatctgggaacagaaatgcacaaagagacaaataacagtaagtttcagagggacctaaattaaaaagcccaagaaaatatgagtaaagacttacattcaaggatagacttccaaatccctttcctttgcccccaagagacagaatagtaaagttcctgctaacctctcaatagcctttcctgaatacatccaatgaatgaatgaacgaatatgaatgggtacttagtataggatcctctcttccaccagaagttagaaacctcagaagagaccactgcgggagggagggagagggattctgctccactcaccttgttgagctcctcaatccgtctaaccaggtaaggattgctggaagagttctcaaaatagacgtaatctgtaagggaagggaggggggagaaccacgaagatcagaggagatgggagacgcagagcaccagggtaggagagaaagttggcctgagtggatcaaaaggagataaggattcaggtagaaagggcgctgagatgtgaaagtggacagactaagagaaaataaggatgtcccccatccccaccgcacctagttctaaaattagatcctttactcaaaagagagccttaaggaacaggcaagaagcaggggttcccctgcagtccccacaactcagcgatgagttgcaccccagtcgcggcgaagtaattgtccgctctagcgcagggcccctaccttttcgaatcgaggcgcacaataacgcctgggaagaggaaacctccgggcggctcccccgcggtggcaaagccgtcgccccagcccctcgcgttccctccctaccctgtcagctccttcggaaccggttccgaaggccactccgtgccccggggagcccctgacgcagccccgaaagtgccgtcggggctgcccgcagcttctctctgggagtctcggagccctgccgcgtcgcggttccccgcaccctctctcctcgtctcccggttccggttccggtccgcgctccggtccacgctgccccatacgctgcgcctcgcgccacccggtgccgagcccctcaggtccctaccccaacctctcccgccccgggccccgtatccctgcgcccggtactcacctcccacccggtacatgttggccgccatggccgttcccgccgccgcctccggccgcacaaaggggtccgggaggctcgcgggggcagggctcggctcgaggcaaagccccgaacggtgggctgccgcttcgagggagtctcactggggcccgcgcagccggcacctccgctgcctcagccgtcgcggttcatcccggcccgcgctgtcgccgccgcagctatcgcctcactcccgggacgctgaggctggcccccgtccgctcggcttcttccggaacgagctcggctcctgccaggccagagccaggctccagctacccccgcccccgcggagtcccactagtcgttgggctctgccggccgcagggaaggcttgccgggcccgcctcagggttcgcctccttccggaacaccttcggccgatccggagaacaaggcccactgctcggctcaggtcggagagcgagaccccgcagatcggctacttccggaagaagttcggctcctgtcgggcaaccgctcggctatttccgtcgcagctcggccccacccccttttccgagggcgggagaggagtcgggcttaactctgtcctcgctggagccctgcagctcctcctcgcgccccaaagactcgcgcgccttagcgcttcgccaggttatttgcaagcggctttgcctgtcatttgcataaatggtctacgctcccttaccctttccgcacgcctcttttccttcgtccccaccccacagagccccggaggcgcccggcagcgccccacaaaagcaccgggaggcgactttggttctggtttattgcccctcagcaggcagcgggagtcaaggcctaggctggggctgcccggctcagccagcgggtctaaacagtgtgtgcaggggcgccgttcgcgccctccaggaaaatgcgcgatcgggaatgtctcgaagtcagtccaggaaagagtcggcccctagtcgtgggggattrggscagggaagggcagggcggggcggggccacgccgccgggccagtcggtcccgccaggcagcgatcaaacgtcgagkgaggaggcgggggacagggagggggttcgagagggcgtggcgggcgccggccccgcgcccccagcgcccagcactcgccactggaagatgctggcgtccttgccgcccagcgagacgaggtgcgagtcgtcgtgcgtgaatcggacgctggtcacgtggctgccgtggcccccgtacatgcggctcggcgcctggrccggagggaagagttgcggtggcggctgagccctcgggcccaccggtcccaccccggcgatccccgcggcctcaccttggcacgagcgcaygggtactggaagagatgcactttgcagaagtcgtcggccaccgccaccacgcgctcgttgtgggagcggcacagggagttgatgtcggtcccatcggagccgtccggccagacgcctagcacagcggccggcctcagcccgacctcctacccaccgccacccacggcccagagctacaccatttcaggcgctccggcagccgcggccacccactgccgcgttccaggcaagccttcccggtcccgaggggcctcctgggctggatcttcaggtttctggaytctcacccaacgacacacgcccagcgttccaagcccaaactgggctccaccttgtcccccacccttccagcaggtttccacgcccctgctcaccgtagacgtgaaagcccagcacacaggtgtaggtagcccattcccggtctcggctctcatagcgattcttcagctgcttgcagcctccagccacgtcccctggggagagggagcccgcccagctcagctctcaccctgccctcagtagggaagatgccagggaaagccagactggaaagactggcatgaaacccggcgatggcatgtgatctggtcaccgtagtagcatcacctcctccccctgtgaaacccaccctgtgtgcgtcctgtcctgagctctggctgaagttctaacagcttccacgagttcctcctccctagataagtcaagtgctccacacttgccctgagaaacttttcccaaacaatcttttcttagcgcatttttgaactccctcaagtcaacaagacatggtgtgaaactagttgtttccaaatcacgaaatttctcctacatataattccaactccactttaaccccatctccacttccttatctaacaacacctctaacagcyccccctacacaaaacccactccaattaccctctccccatgtcctgctccactgccactcacagtaaagaatctcatagtccccagaattggacatgatgaaattcccatccttggaccagtcaagatgagtgatgaagctggagtgaccctgggagcaaaggtcaagagttttaaagtatcccatccatttcccatccccagagcccccttgatgcatcagacccctgagtttcgcagctgttatcatgccccaccacacaccccaacttcctcaccatacagcggccaaagcggctggatttggcaccatcactggaaacactatagatgtagatcacgttgtcatgggaaccaatggccaggtacaacccatctgcaaayacagtcactcagagagggaagggccagggacgcatgtgagtccagggttggggtggctcccacctgggctgtaccggaccactgagagctgctcattgccatcaatgacatcagacacgatctctctggtctctgtgtccaaaaccaaccacctggaagggagggaagtggaggcagataggaagacgaaaaggcaggatgtaaggagacccccagggaggccaccctgggtaggcttggggatggcaaatmagagaagctcagagacacacacagaaaggctctgatgtagaagacaggtcacaactgcattcttcttttttagtttgttgttgttgttgttgttgttttgagacagagtctcactctgtcacccaggctggagtgcagtggcaagatctcaacgcaacctccacytcctgggttcaagtgattctcatgcctcagcctcctgagtagctagaattacaggtgcgtaccaccatgcccgtctaatttttgtatttttagtggagacgaggtttcaccatgttggccaggctggtcttgaactcctgacctcaagtgatccacccgcctcagctcccaaagcgctaggattacaggcgtgagccaccgcacctggccaccactgcattcttatgctgagaaatgggaaggagctaagtgtggataaaggctgaggggcttctgatgtcgtctgaaaaagtaatctgaaactacagaccaggggccgactacaaaggcactgtgcaagctggaagcctgtcacttccctgtgtttgtctatgcccctcccattcccactgtttctctatcctgggctgctgcctcctccactcccaggcttggaggagacactgggttgggggagggggagaaacagttaccacagaagaggaggggagcccgggtggcaggggctgcagggagaggcacagaggagtgccaaggcgcaggtggctcctgggtagaggtggtcactctcgcccactcccccagtaccaggaacccttcccagtcctccctgctttccctcctgggagtcctggctctctctcacctccccgtgttcagtcctacggccacaactgccccactcgggtggaagtcagcacagagaccagtctcctgggagaggggagaaggtgaattcaagatgatgtctttctagtgagggaaccagagtgaaccccttgtcctcctaacttcaaagccacttactcccaaggagaagatgggaagagagggaagggatacccgggtatcactggagcctgaacagggagtgataccaaaatatttaaccacagaactgatgccaatagctgtgctggagattaaccatttaggtgctggatcaagaggaagtctgaggggttctgggggcggcagggagtgcccaggtggtactagaagcatcagcttttaccartcagtacagaaaaattaatatttgagtagccagtgcagccataccagtacaaactggccacctctgggaggcagaaggcaaggtgctggggaaggcgtggtggccacaggtgtcctggtgggtgtggcatgggggatccaggggcacagggctctaccttgaggtcgatgctccaggccagtgcatggctctccccatcccacaggcagagctkccggtcgtggccgcaggtgaggaagcggttctgggaggggtgtgtgcagagcccccagagctcatcagtgtggccctgcagcacagcatgactgtcactcctgcccctctctcacacccctttgtcccttcctcccctgagcccttaacccccaacctggattacaggggagaagccctgggccaggtctcccctcagcaatgcattcttcgtggttcccaccagcagctcagagccaagcccttcagcaatggctcgcacggccccgaagtgctcgggaatctgcagagtggtagcagaatgtcaagagcccactgactattgcycttctccctcactcccttgaccccagcccagccctcacctcagcctcctggagggccaccaacccgggcccccactgtaccagccggcggtcccgcccgccaccactcagcactgtcccgtccctccggagacacaaggcgaagatagaaccttcatgagcgtgagcctgggccacaatcccataggtctctgttggcaaagccccaggtagatcatgttttgggggtgcaggggagtgagaaacagggccagcttggctgtcgcaatacagtaagaactcccagccattgcatgcactgactactatgtctcatcctcatactgccaacacatctgttattctccccattttacaaacaggacaactgagactcacagaaatgaggtaacttcctaaaggcaaggcaactaatagcaaaactggaatctgaacctgagatctggcaaacacaaagctccagccgtttctcctttgctgtgctgcccacacgcttctagactagcccccaagagaactatcaactctcaaggtaaaaaggtgggaaacctggctgggcgccgtggctcaygcctgtaatcccagcactttgggaggccaaggcgggcggatcacctgaggtcaggaattcgagaccagcctggccaacatggcaaaaccccatctctactaaaaatacaaaaattagctgggcgtggtggcgtgtgcctgtacttccagctacttgggagactgaggaaggaggatcacttgaacctgggaggcagaggttgcagtgaaccaagatcgcgccactgcaatccagcctgggcaacagagtaagacctcatctcaaaaaaaaaaaaaaaaaagatgggaatgggaaaccctctcctctgttcccacagaacctctggagtactacacttcccagatgcccctcccagccacatacctttggcgccacccctgcctggggtcttggaatctgaagggctccgcccccaggtgagaatgttcccctctgagtctccagtgagaatgtctccatccggaaggaacacaaagcaagggataaacttgggtttcttgtatttctagtgggaggggagagcagacagtagaggtcaaagggaagggcaaagattaaaagtcgcagggcaggccaggtgcagtggctcatgcctgtaatcccagcactttgggaggccaaggcgggcgggtcacctgaggccaggagtttgtgaccagcctggccaatatggtgaaatcccgcactgcactccagcctgggtgatagagcaaggcactgtctcaaaaacaaaaaaaacaaaaaaaaaacgggcrtgatggccaacatgatgaaaccgtatctctattaaaaatacaaaaatcagccggcgcgcatctgtaatcccagctactccgggaggctgaggcaggagaattgctcgaacccaggaggcagacgttgcagtgagccgagatcttgccattgcactctggcctgggtgacaagagcaagactccgtctcaaaagaaaaaaaaaaaaaggtcacaggggcaggtgggggttagggaacctcagggtccatagtactcagcccagtgcttcctcttccactctgccctccccatcaccttccacttatccatgcctcaccccaaagacaccctgtttccgggtaagggtcccattcccaggaacccctactccaccactccaattccagaagtggacgtgagatttcccactggtgacgatgcagctgctgtcacgagggttgaagccaacggccaggactgagtcatttgtactctgaagggaagacactagattcagccaccccaagccctgggtaccttcattctacttgactctcctcaatttgcatcatgacagctggctggcagaggtccagaaaccccaggacaacccttctttcaaaaccctggtcccctaagagcactatttcctgtcaatcataattaatcaccctaatacctaacacattatgcctcatgaggtcagaacccatgtcacaaatgaagaaactaagggtcagagaagctaggagatttgccccatgtgacccagccaaaaaggaaggaaatgtatrggtgagtctggagctccctgcactccaccactcccacccccaacctcagagcccctccaagccacatggactcctcaccttgatctcagccagcttcattccccggctgcagtcccacaccgacagcatgtgctcattggaatcatccaccacacaaagaaaggcaccctgatcctgaagaagggtgacacataggaggtgcagagtgaaccctggaggtccaggggttcatgrtcattaggttaagaggtaccatcacagatggagagggcagaaaaagttgacacacatggccctttctcaagagaaccagctgggtggggttcaggaaggccagaacttccaaggcttcctggtgacatgcaagagtggggttcctaggcaaraatgggggtctagaggcttcagggccagctcaccgcagctgaaaaggccagggccccaacaccccgctcgaaggcccccagtccaatctcctgcagtttcaacagcgtctctgagtcccagatgtgaaccacaggctgcaggggctggtggaggaagagtcacaagtgtgaagcaaaaytggagtgcaattccagcatgtctgcctgctccctgactttggccttacctttccatccttatccactccagctgtctgtcccgaggctacccgaacaccatcagggtgaacagcaaggctaaggcagggggaagacactctagggaaagggtctctcaagaccatccaagacaccttctccaagcttgcagagcagcaaggcaactcttttctcctgcttctccatccccccagaccctcttcctgccaagcccaccagccccggactcctcaccatcgaacgcagtctgtgtgcccccggtaatgtctctggccgccacctccaggaccccctgggcctcctccaggccggtacagcaccaccacacaggcgataaagtagaccacctccccagagygcaacacaaacagattagagcgggagtcacgacccctgtacccataactggggtggagatcacggtcaaggaaagggttagatcaagggcaggaggaggaagaggggagaaagacagagcttctggctggcagggcctagagcagaatgatggtaggagaggatctagaaggctccttgtccccacagacccaggaggaaactgtaaaggtaagaggggtcccaaggtgagaaaggtggttctcatggractggaaggggcaggatacacccagtcaaggctgagggtctctggcggtgggccactcggcagctcctcaaggctgcggatgccagacgggatgtacatggtaatggggcgccctcgaaggaacatcttcactgagatgccttctacagagaaaaggggtggtgtcaactacccccttccaggaaagacagagcagaaccctacccaccacacctacccaaaatagctcctggggctacagcccaaatcctaaccctgccatccaagttttcctctctgtccctctttacatacccaaattgtaattgctcctccgagatccagggcccccagggctggagagggggtcttttcccccacggctgttgggaagagagaaagcacagggattggggtcaggtcccaagacctaagcggggaggggcaggacacaagaaaagaggtcactgcagaaaccacagtcacttctgcaagcctgtagtttgcttcgtgagtatcagggccctagtagatggagacttctagttccatttaagagataagaagattgagrctgaaggggctgagcgcacagcacaaggccacaaagcttggaagaggcagtgcagggtgccagagccctttctctcctccagaccaccaggcctcagtctcgctctgtcgcccaggctggagtgcagtggtgcgacctcagctcactgcaacctccgcctcctgggttcaagcaattctcctgccttagcctccccagtagctgggattacacgtgcgcgccactaggccccgctattgaccttttcatttccccatccgtaaaatgggaccaaagggagtcgagaatgtacaccagctccgcctctcagggatccgggaggcaagcaagaaagtccacatctctccagagattcctgtcgttagataacagtaaagtgatactgtctcttcagagaataaagcacaggccaaggacagggctagaatgaacatccgggtgtcctggggcccgtacatactctgaggcaactacatccggccactaggatgtcctcttgccctctagaagtaagtattaatagattggtacttggtagatccagcggaaagagggctgaagctctagggacagccgtccatgaaagccatggaagcttctagaaaagcctcttgggatcgcagaaggtgtgctgtgatgtagtggaaagggtaggggaactggagtcaggaagagttaggttcaaatcctgactctagctgtgtgaccccaggcaaatgacttaccctctctgagcctgcttcctcacctgtgcaatgagcagcrtgagaccacctaacccccaaggatgttgtggggactgactgagatggaggaggtcgagggtttagcacagtgcccggtacacagcaggcgccccagragtgtttgtttctttattcctgttgggcaatcaggtccccccaccccaaccagggatgtgaggtgagggatatggaaagtcgagagcctgcgcctggggcggggtgggttgaggggaagcctcacccacctctctgtgctcccggaccgcactaacaggttggcggaggagattgccttcctggagagcttctgccgaggccgctctgagggggatgaggaggaggaagaatttcttcgcggcctggtgggggcatagtgaaggtcattccctccaactgtactctgcaatcctaccacccctcccagcttccgccacagggccacaggacacctacgtgtcagcacgctgtgggggctgcaagggcctgaggatccccggggggccaggggagccagcaccactgctgctgctgccccctccttcagattgggtcccrctaggctcttcgctggccccctgaggggctgggggtccattgctcaggccagggggtccaggggatgacttgagctccacctctgtctccgtctgggtgcctcggctcaccaaggaaggggtgcacgtgggtggcagtccygggggggctgcaagactgctggagagatgttgaattaacctgaagccccagaggccccaaggaggaggaaaaatggggtgtgatgacatgcatacctgtcccccggaggagctggtgtgccagagccctgcagggaggaagggggcacctgcagccgcagcaggcgaagggcttctgccagggctgcctttaccagttccatctcctgctcctgcacccgaagccgctggctcagagactggagggcctcccgagcagggccgtcacctgggaaaagggcaagaggtactcagaatgtacccatcacctgaagaaagcgtagaggggattctgtctccccacaactttacatgtgtccggtaggactgcccctttcaggcagccccaggcttgaatgctcgtccagaggggaggagacggtggtaaaggatcaagggcctccttctggcagggcaggcgagaaacctggcaaagctcccttcctgctgccgtctcagcctccgcaaagactgggagtaccatggagtaccgggggggaaatatggagtactgccgaggaacgtgggagccacagagagaggcgccgcactggtgagggcagggaccgcagccctccccacgcgcccccagcaagctcaggtctccagcgaaagctgagtaactgagccgggggaacaccaggagagagaacggggtgcgggaatggagtcatactgaggacccagagtacaagaaaagagatccagagtgacaggagagagtgtgagtggtgagcagagtcacagtgaaggtctcagggggcagtggggatcagaaggaaaaagacctgaaataccacgagaagaggcccggagtaacgcagggggcagggaaacatcgaggggcccggagttacgtggggcgtagaatgacgctggggaagcccgaagtgacagcaagacccaagcaactagggagggcgaccggaggaactgtggaggatgctcggagcccctggggcggaggagcacgcggggacgcctccagacagccgtccagctctggcataacccgacgagccgggcgctccgggaaggggcacgccgcccgccccgccccgtactcaccgggccccgcggccccgtccatccggcccccgggttgctccgagcggcggcggcggaggaggcgtctaagccgcgggggccacggccggggagaggggaaggggaagcaccccggggcgcgcgcgaagggcgccgtaccaccaccccgagggggcgctgtcgggcgcggggaaggggcctggagggggcgctgtgggcccggggccgcagtgtccagacccccccgggccctcggactctcccggggccgctctcggctcccgggggtggggtggcagggccgtccggtgccacagcgccgcagcacaaacaggcgccggacgcggagccgccaggaagcgcgggagggggggcgggcccgagggggggccgggccgcttggtaacccctccctgtccgggcctcgccgctcagtacgggggcgggctagccggctgaccccctggcctactcccggcctccggctccaggcccttcccggatccccgcccccggattcccaggggacggggaagggagcgcccgccccgatatctccgccccccagcccctaacccctcagggttgagcggaccaaccccaccacttccgcgaggggcaggggcggggtcacaaaacgggccctcggcctaggggcggagtttctcgtaaggggcaaggccaaggcatcttgtattggggctgacaggggggcgggttattagggctgaggatgggaggatgctcagggtattggggtcagggtggcattagcccagctcaagccgggccgggctgactcagcatcctgccccagccagcttccatccctgacacctctgcactcccttgggcagagatgggagatggcgccggtgttgcccctggtgctgcccctgcagccccgcatccgcctggcacaagggctctggctcctctcctggctgctggcgctggctggtggcgtcatcctcctctgtagtgggcacctcctggtccagctaaggcaccttggcaccttcctggctccctcctgtcagttccctgtcctgccccaggctgccctggcagcgggcgcggtggctctgggcacaggactagtgggtgtaggagccagccgggcaagtctgaatgcagctctataccctccctggcgaggggtcctgggcccgctgctggtggctggcacggctggtgggggggggctcctggtcgtcggcctcgggctagccctggctttgcctgggagtctggatgaggcgctggaggagggcctggtgactgccttggctcactacaaggacacagaggtgcctgggcactgtcaggccaaaaggctggtggatgagctgcaactgaggtaccactgctgcgggcgccacgggtacaaggattggtttggggtccagtgggtcagcagccgttacctggatcccggtgaccgggatgtggctgagtgagtgatttgcgtctcccttcctcctcctcctcctccctggacaggctccctcctgctgccttgaatccccacctcgctcagaggggcaataagtagaacatagtggctgagagactggttacagctctgccatttattagctgtgaaacccagggcatgttaccaaaccaccctgggcccattccttcacctgtaaaatggaaataatagtacttatctgatagagttgttgtgaagatgtgaattatgcttggctggcacatagtacagcagtcagtaaatgttttactattctttttcccttctgaacacctgtgcccttcagtccctcccccaggcctctatctccagacatcctaacccctctgtccctccctttgcagccggatccagagcaatgtagaaggcctatacctgactgatggggtccctttctcctgttgcaacccccactcaccccggccttgcctgcaaaaccgtctttcagactcctacgcccaccccctgttcgatccccgacaacccaaccaaaacctctgggcccaagggtgccatgaggtgctgctggagcacttgcaggacttggcaggcacactgggtagcatgctggctgtcaccttcctactgcaggtgagtcagcaaagcatctgacacctcctcccacccgggactcctccctgcctccaaccctgggcctcttggaaccgctgactctccctgactctttccccttgcttcccccacaggctctggtgctccttggcctgcggtacctgcaaacagcactggaggggcttggaggggtcattgatgcgggaggagagacccagggctatctctttcccagtgggctgaaagatatgctgaaaacagcatggctacagggaggggttgcctgcaggccagcacctgaggaggccccaccaggagaagcacctcccaaggaggatctatctgaggcctagaggcctggagcttggggtgaggaagagggagggatggacaagtctgaaaacctcacaactccttaccaaggctccaggttggggggatcgtaggattagaggggctaaggatagtcagcgagctggactggggtaagaaagaaaaccagatgtcctagggcctagcccttgtagtcagaaccaccagggaacagcaaagaacagagtgatgggaaagtgacatgagaaggcctggaggctgattctgatatagactcaataaagtttttggatggaagcaattgctttttcttgtcaaggggatgggggcctgggagaactgatttctgtctgatggagcagctaggactccaaagtttggaccctggctcgacctgtgcagcaacaggagcccacatctgtaaggatcagaaagcaagaacccaatgtaagaagcaaaggaaaacaagaggcccctccaggttgagattctttattctggaggtaggaagggggtcagcatgctcaggtgggaagggtccagcccagctcctccagccccccagtgcatgcccagccccaataagttacccagttactcagctgccctccctcctgggtccatctgtccttctgttccaccctagacagggccaacctgactcaacacaagggctgcttgtccccagcctgtgggcagtgccacacggcaggctaggggaggggtgaagcagcaggaccatgccctgggcctggaggggcagaggggccacttctggctccaagggtcaggacttggaaaaccacatcctgggcaggcctggggcccagtcccacaaggtctgtgcctgaaaagaggtggtagttggggtggggccgccatcacacctcaattgctgggtctgagccccggccctgccgctgcagctgctcctcctgcttcatcttgggcttctctgtccgagtatgccacaccagtacctgtgccaggagggatgcagtgagagccaggcccagctgcagccaggcctctgggtccccgagcctggaatggattctctaaccctatcgacatatacagtataggcttcaaagtgtaaagggcagggtggaggaagacttagtgcctctaaaaccgggccttggccgggcgcgtggctcacgcctgtaaccccagcactttgggaggccgaggaaggcggatcacgaggtcaggagattgagaccatcctggctaacaccgtgaaaccccgtcactactaaaaacacaaaaaaattagccgggcgtggtagcgggtgcctgtagtcccagctacttgggaggctgaggcaggagaatggtgtgaacccgggaggcggagcttgcgctaagccaagattgcgctactgcactccagcctgggtgacacagcgagactctgtctgaaaaaaaaaaaaaaacaacaaacagggccttattccttcatcctctctgtgccacatgggttcccagaactcggggcagagtggcaggagaccactttcccccgctagttcccagcttccccttcagtagagtcagcaaggctgatcagagatctggagagtccctcctggttaaaccacccattcccagggtctcactgtacctcccccatcacctgtccatccaagagccaggtttctatgcccatctccattcccttacccgagtgcagttggcagcccgtggctccaggtccttgggatccacaaggtggctcagaagactgctctccaggtggccccggggagcggtggaatcaaattgggcattgggcttatctaacagcaagggcagggccacggcaaatccagccatatccacagggaagggcctgctgggctcccatgctgtgtggaagcccactacccggccgtcctgtacctgagggccctcgaatcgcaggccgcccaccagccccacaggccacactgagacaccacgggtccagcgcatctaacggaggtcgggagagaagaaacagaggggtggtccggggaagggagcagcagaaagagccacctggctcactctgccccactgcttccagcccctcacccagcagccaacggcaacactgctaaccaaggtaacgaatgaagctggccgcacctggtctcttgcccatccccatcctggtgctcacctcctcaaacagctcccggctgtaggtgttgtcatcgtcagcaaagtagacgactccttgggtccctggtggtggtgggtccttctccccacccacagcaccccctctgccccggagccagtccagggccttgttccgctgctcgacaccacggggatgaacccagccaggctcgccctcccgaagccgctgggctttgggcgtgaggaccaccaggtgtgtgaagaggaggccagaggcagccagcagccctgagaccagcggggtgggaccctcagcatcctccaccagcagccaatgcagccggggcaccaggctcagtgtctgggacagtcgtaccagctctgccttctgtaccagcctgcaggggagagatgcagcacaaggaaaaggggcaggcaccatttgcctgctccagccagggcagacagcttctcctgggccactgcctgcgtctcctgtggcccttcccaaccaatgcctaaactccctctttcttgcctgtcaacttcatgctaacactcacctgccctgttcttctggtccatgtccatcacccacctcaactccagagctcaggctgtgggagactataaattaagggcacagggccgggcatggtggctcacacctataataacactttgggaggctgaggcaggtgaattacctgaggtctggagttccagaccagcctggccaatatggtgaaaccccatctctactaaaaaaatacaaaaatttgctgggtgtagtggcacatgcctgtaatctcagctacttgggaggctgaggcaggagaatcgcttgaacctggaaggaggaggttggagtgagctgagatcgcaccatttcactccagcctcagtgataacagcaaaactccatctcaaaaaaaaaaaaaaaaggccgggcatgttggctcacgcctataatcccagcactttaggaggccgaggtgggcggatcacctgaggttaggagttcgagaccagcctgcccaacatggcgaagccccgtctctattaaaaatacaaaaaattacccaggcatggtggcagtcacctgtaatcctagctactcgggaggctgaggcagaagaatcgcttgaacccgggaggcgaaggttgcagtgagccgagattgtgccactgcactccagcctgagcgacaagagcgaaactctgtctcaaaaaaaaaaaaaaaaaaaaaaaaaaacaaattaagggcacaggctttgggatcaggtagatctgggtttgaaatccagttttgtaacttattatgtgagacaatttgggaaaatggctcaatctccctaagcctcagtttcctcaactgtaaaatgggaataacagtactttataacaatgttgttttaaagattaaataagagctggggatggtggctcacacctgtaatcccagcactttgggaagctgaggcaggtggatcatgaggtcaggagatcgagaccatcctggctaacacggtgaaaccccatctctactaaaaatataaaaaattagctgggtgtggtggcgggcacctgtagtcccagctacttgggaggctgaggcaggagaatggcgtgaacccgggaggcagagcttgcagtgagccaagatcacgccattgcacccagcctagatgacagagcgagactccatctcaaaaaaaaaaaaaatacaaaagtaaaatacaaaaaattactggccaggcatggtggctcacacctgtaatcccagcactttgagaggccgaagcaggtggaacacgaagtcagga

SEQ ID NO: 97400 - DNA, 136818 bp, Homo sapiens
cttttattgttcgtgtgaattggttcctctgagctttttaaaaaggattccagatcccaccctcacagactctgattcagtatgtcggggtgtggctatggaatctgcatttttacctgcctcactccacaacccctgcctcaaactcgcaccaagttctttgaacagctgcctctgtcaccgcaggatgacctcaatgctttcctaaagccccagaaccaattaaggtaacctgtgcttgaagctgtgcttgcttacagaaacagagactggatgtcagtaaccaccgtgctacaagatgggaaacgaacttagaagcgctaccctaacctgaatcctcaattgctaattaccatacctcaatctgtgcctacgggagaaatgcagcttgctaggcacatgtagtgttgggcggcaacagcaaataggagactgccacactcagctggttctggaaagccccatctctttccaggaatccttgctttccaactacgtgccctaaaagaccttaaggagcacccccacactacaccccaggcactttgagcaggagctctcctactccattccttgatcagtgaatagtttctgctctgcttaaccgaacctggtctccttctacgggcgagaaaggcaccgggtagggaaaggacccaccagggtcaaacgaccctcttgagattcaggaacacccagatgatctccaagtatcttttcaggagtacaactcttggcctttgaagctgagacgggaagggaattacaacgggcggctgcccagctccccatccaaaacctccttgactttgggctgaggtccttctgcctactgcccttgtcagccatcctcttaagaactccaggtccgacccgggaaaagaaaaaccactcatagaactggagagtctgtccacacggtgcacgtgcccgtcagtgcccaccgctctggattcacaggtgctggaaagtctgctctcttatatctctcagctgaacttttcccgcctagaagggctcgcccgcgtgcggcaggagcctgggaattgacactctcactggccaatggacgaagagtctctggaggctgtttttccctcattggatgtaaatgactcatctctcatccactttggaagccaattatcatcactccagacagtgaagggaagggaaggatgagagcacacgcctgcgcgcgcgcgggtgggtctgaaggccgggcggagggcactgcgcgcccacccgcacccctccttatttgtctggatgacccttcccggtctcagtgatcccctctccgcgccactcagtccacggggacagctcccgcgtcccaggataaactaagcaatcactgccctgctccttccttctcatgggagtcccctgtctcccagtggaagccagggaggagctgcgcggcagctgggcggagtgcgaggcacgtggcgctttcgcgctttcccagacttttgattgccagcttgggcagcgcgctggcgggagctgcagggcgaatagccagccaagttgcttaggtgtgtggcagttgctgccattctgcagctgcggggtgggcgacggtggcgggatgagcatccaggcgggatcctttggcagcagcagagagagctccacccggatgatgcagaggctcaggctccagcggacttcaagtcccagagcaggctgcacccgcgtctgcgtgaagtctccagggatttggcctgatccgcaaatgagctaacttcgcggaggggctggcgaacacagacaatgccagcctggacgaggaagcggccaaaactgcttaggcttggttcccaggacgcgcattactgagtgcggtactttactcttcggatgaagactccagagttcggcctccccaaactgatatcaaagaagtgctttccatgggacttgagaaaacgtcttactgtttaaggaaagaacgtcttactgtctgagaccctgaatagaaggagatgcctttagtattgggtgttatttttcagaagttggtcaaagaaggatacaagatggttgattaagtggggatggtgacaattattttgcaactcatagaaggacagatgtttatgtaacagttgatagttttggtggaataatcatgagcatgtttctgaaattaatataaaatatacagagacccctaaaatcactgcttaaattacataggtcttgtggtgtttggaaagagcaaactttggaagtataattgtaaaaataatgtcatacagtcaaggagaagagaaaacttaaggacagctttctcaaatcgctgttattcttgaatcatctgaaagcagtacacgtgcctggcaccaatatacatcagagagtaaatcattgcacaaggagacttgatcttctttttttgtagaatctggaggaaaaatatctatgaaaaccaagaggtagtagagaatggtgttgtcggaattgcctgacatcattggagatagaaaatttgccctggtaaaaggtgctcctcagggaggagcatctgcacattccattagcataaagcccctggtgggccatatgaagaagtctggatttggctataaatgtgaaatttattttaaatggaggatttgaagtaagggagaaatataccctgacatattttttaaaaccaccctagcagcgtttgtgcgcggtacaaactctgggaggacaagaagagatgtggaagggagaaggcagctaagagtctatcccaggattgcaaagatgttggagcccgacctcagatggtaatggtggaagtgttagaaatggctggattccacatttattttgaagggccagcccatggaatttgcttatggatggtccataaataagagaaacagagggctcaatgatgattcctgggcttttgacttgagcaactagaaggatggggaagtctgaggacagagatgctgtgtgtgccaggattgcggtgcttatgtgtgtttgtgtaattctacttgtgacatgttgaattggtgatgctaatccactccaactgaaaaataaggagggaagtggacattcaacacatgatgacaggaagacagggaagctgggacttatgatggtaacaatgttggccattagctgagaagttttgtatttcaatgttggccattagctgagaagttttgtatttttttttttttttggacacagagtcttgctctattgctcaggctttagtgcagtggcatgatgtcgattcactgcaacctccacctcctgtgttcaaaccattctcatacctcagcctcctgagcagctgggatgacaggtgcttgccaccatgcccaactgagttttgtttttctaatagagatggggtttcaccatgttggccaggccgggtcgaactcctggcctcagttgctttgcctgcctcagcgtctcaaagtactgcgattagagatgtaagccaccacgtcaggcctaagaattataattaaagtacagggaaaattaaaagggagaagaaagttcacagagagatatcatggcaaatgataaataaaaaagcctgccttgtttcccataccccctgtgtcttcgattccctgaattttacctcccagtggaccgtgcttgttccttcgtaatggcgctccaagcagcactgctgcacaccaattcctgagcttccctgcttcttgagcttaggaatagttgtgcttctacttcctgtttatttgctcatcactggcgtagcaactgaaccacacaattgggataagtaacctgatgccgttttggggagcaatcttccatttcttccttacgtataaaactgaccctcacagagaaactaactgtctagagcgataggtccagagtagagctctagctttgcttttccctttgcagctttgccctgagaggtttgatgcaatcccactgcaatgggaatccgtgaaagagtagggatgctcagggaatctgttgggccactaggaaaaactcatttctagctaatgcttatacggggctatggaagttgtctaacatccctggggacagagtgtttgccctgaaaaggaacattcccttggcacaaagcatcttgttggctggattttataataaacgtgacaagaatgcttttggccagtaactggtggttaggtcatattgtggtttgcaaacccataaagaggaaaaggcctctcatgtggttgggagaggtgggaatggatcatgcactaaggtcaggtctggtgaagttagggaataaggccagtgtttacgaagagtgattccttcatgaacccataaaagatgctcttgaaccctaatagtaggatgatgtctgtatttagagttgcagacaacatgttctgggaatacagaggaaggcaccactgcctctaccctgagagtatatcacagagaaagattaatatttggactagatggctgagagatgagtaggagtttgatagaagagaacaggggaagtgtctggatgtacaatggcagaagtggcaggaaaggctgaggagaactggcctctgggggtgggttatagatatgggcctgggcaccacattctggagcttgcaatgggttatgtaaaagcttagatgggacggtcttttcctctcctcctgtgggttcgtagtgggcccacctcactcactgctgcaaacaagctgcccccatttgagagagagctggagtggggtctctaagcctccagcaaccacttaggagccatccttgatgccctggcagctaactcttcacatggagaccccgtagtccatcctatcttgggaagacaatgcacacagggggaaggtaacatccccctccagattccagaggctccaaggagcctctctctctcttcaagaaaagaaatagtcactgagccacgggtggaggtgaacatggtttgggaccaacaggcggctggatggtttcacctccacggtcatacaatggtactgggagatgaatgggggtagggcgatctagaatcatttcaacctcaacttacaatggggtggtgcttggtagttgactcattgtggccccatttaatatttgcagtcaccagttggggtaggtgtgactgttgctcccatttcacagattaggacaggatagtttgctagaggtcacaggactagttggggaaaggaaagggtgtcaggtaggattttaaccttagagcctcacgctttcttaggctctttcagggagaccttgggcaaattcctttctctcttggtgggggggtctccatttcttatttgtaaattaaggagttcttccagtttgtgattctctgtactttaacttggataggttttttaaaatggggattatgggaaccccactatatttaagtagagtaggtctggggtgaggcccagtaatctgcagctttgaacaaaccccggcatcaacaaaactggttgagatactcaggaaagtttatggtgcatgaaaatcttattgcgagcatccaaaacacataacactgagctccatctgcagagatcctgttttgatacccttggttggactgtggctgggtaatttgcatttgtcagaagtgaggccagtcagctggtcaaccagtcctcctgtcactctgtgaccctcccccggtgtccgcggtgcttctttacttgcatcttgtgggaatgacatctgcgcaggcagccccttttagcaccgcccctggcacaggagctgagctcttaaaaaccaagcccagccctgagtttgcagatactcagggaaggggaaggtgcctttccgcatttggtgtagtcccgcattctgccatatgatggcgccagagaacgcgcctaccgggatagggaggggcaaggaggcgaggaaggaaaaaaaagagacaagtgaagattgacatccattaaggccaatggtagctcaatcttctgttctctgactcccaagcttcccattctcttaggaggctgcatttgtggcgctaaaaaaagggatgggcgtgggagattccaggacttgtgctcgctgaagatacaactgttagtccaaggtaactcccgctcgtagtggctcaaccctctttgtcaattcaccttcctctaagttaactatggctgctccacctgtctttagggaaacctactccccatcgcgctgggtgttttggagtttttaaaagcgtcgcggggtaaagtcagtgttgtgcttttccttttctcagcaggtaagtattcctggagctgacagcggggagttgccgggcgggagtaggggtgaagagagaatagggagagagataacaggtgtgaagcgtccstcaatgccaggcatcctgctttggcaccttccagaaatttgtctcaatcatctttctattgaattcattttctgtttcacagattaggaaacctcaactaagtggcccaaggagagtccttggataattttaacttgtgtcagaaaccaaagcccaaggtcttttattttgcagaggctgctttggcaggatttcaatgcatgcaggtcctgcgaatcactgctcctcactcaatgatccatcccgctgtccacacattcattcacccattcatttcttaggggcttatctgcaaggcgtggggctggatgatactaaaaatacaaaagggactctgatgtaaagtagaagagactttttaaaaagatttacacagaattccggtgctcagcatggtttcgatttttttccccaacatactattgatacctattatgttccacataatatgatggattctgaagatacagagatgggtgagacctatccttgcctttcagaagctcgttgtcataggcaagagtaatctctgaggtttaattttagatatctattttttaacaaattgagcatcaactctatatattctactgtaattaatgtactaaataattaaatattacacacacttaatttcttaytttttagatgaagatgaatctaagtggtggttcaagtatgtcctttgtccatcctagtggaccattttgggtgcttcagactgcaactctaccctcctgttatgtgcttggctctattccttctttctgcagctctctgtcaaatgacaggctttgagggaaaccagtcctgaccccttcctgttttctctcctttttacctgctcctatctgaggcctcttttcctatttatttgttgttctttctccctccatcatcttctgtcgtcaaatcatgtgttgttttcatatactacatctgagtttatagggaatatgttcacagttgttttaatttttggtttagcttctgcctccctgctccagaatgtaagcttcaagaagggcggcgaggagttcttgacacctgtcactgcctgagaaacggttggggatggagggagacagttttgcccagtgcatcctgaaatcccctgaggtgggggtgggagtggagggaagatcagggaatgtccattcattttatgaagttgaagttgggttaaatcctattatatcctgtgatgttgtttgttaatctcaacctgaagacctcatcgctagtcatccactttttgctagctttgtgaccttgaatgaaagttcaaggctaccttgtttctttgtacctcagtttccttatgtataaagtggaaaattatatttggtcatcctaaaatgtgatgtcatagggaatcagtcacttgagggtaaaagacaaacatttgtcaatgtataaggctgcagaaattatattcttgtgagggtcaaagaaagatatttgtggatttgagagtcttcagatattatatcggtagcatatgtacatgcaggaaatactgaagaagcaatttaatcaaataggaaaagagatttcagataggagcagaaaataaggagaggaaacagtggtgagtaaaaaaaaattgacaaattttatgtagagagttaactctaaatggacaatgataggctctctgggaatgtgtaagaaaagttttaaagaaggattctttaaattgatgagacacactgcaagggaaattctgtgacacctggaactaaaacacgtggaactaaaacatcgggctcagggggttgaacggtagaggaataaaagcattttgtatcacttagcacactcatctggatctgaggagggagcaaaacagggaaataaatctattggaagatgtcaacttattgaggtaaaggaggaaacggtgaatagctgttactttattttatataatagtaaacaaatttgtgttcaattatgagcactagaaacaaataccagtgattgaataaaaagttaataagggaatatgatgtataagtgagttaataagagaacttgatggataagtgaattaataagagtccacagtggaggcaatttccccttttgaaaaacattatcttttgaatatacgcaggatatacttttcaaaagaaaaaaaggtgtatattggggaaacaattttcactcattctcgagacactcaatacttttccctagataatctatggctatacaagcataataatgccttttcaatatattttcccagcaactaagaagttcagtgtttataattgtaataagaagcgtgctgatctggcctgaaatatagttttaytttagatatatgtctcataaatagaatttaagaagtcagggaatatgcttagaaagggattaccaaggccctataacacatgagtttgggggcacagggtgattaagatttagaataaagttaggtgaaatctagggccaaaggatagcaggagggtgtgtgtgtgtgtatgtgtgtgtgtatgttgggtggggcaggtgggaacctttggagaatgcctgtaggctgctagtgaggtgctatgatctctagaccttggtaggtccttgcaaagagacagggttctgaaaggctggcaccattataggtttttaaaatatttttgttatccataggggtgaccctggagatcattaccaaaatttaaaaatttcaccactgggcacacatgttacccttctygtgatggcatggcaaagcttgatttgcaagagtttcttttggattgtccccagtgattccctttaaaaataggagctccttcaaggtaagaaaggaaggagaaaatatcccttctaacctattttctcttttgcattccaaggactctggaaaggcacagcaggtttgtttttgaaatctgtagaattttagtgctctccattctcccaagtagatgactttagtgaaggtaaaaggaaagactgtttgctgtgtcaagggaagattcatatgcaaatcccaagactcagatgttatttcagaagctttggtgtccatagtaaagtagaactagcccgggttcatctgcctacaagggcaattgtatgaggcaaatatgaggaaactggcagaacaggaggggtggaatcttcctgggagaaacagtaaagagagttctaggtggagaggggatcaatgtgttgagcaaacacatggctgtcttcttagttcctatatgaaatcatggaaaagacttttgaacaaagaataaatatgtcatagcaggaaaacaaaaagcagtcttttggccagaaatagaaactgttaaaaagaaaagcaaaccaacaacaataaaaaacacctttaagtttgaaaatgacagaagttaagaagtggaaagttgcctgggatatgcttttattgcggcctctctaataaacccgtccccactccatcttcatgtccttgcttatcctaagcagcatggtggcagctgtggcattcttcagactaaagtggtcatttttggcacttgggcttgagatggcagtgaagcggcatcgtttgtctggggaaatgccagaggtttgctgtctcacagtatggaaattgagatgtggacaccaaaggagtgggttcaagagcaaaagtttaataggcaaaagaatgaagagagagtttcctcatgcattggaaaggtgcctgagcaggtttccgggtttggggcgagttgtggttggttttatagaggagcttgaggaggcagtgtctgatttacatagggctcagagggttggttggagcaggtgtgccatttatgtgatgcatgaagagcctggccatcccacatgaatctttagtatgcaaacggggcctctacctggcctgtgccatgtcgcctgcacacgtgaatacaaagaaaagggaataggaggccacgcgtggtagctgatgcctgtaatcctagcacattcggaggccaaggacgatggatcacgagaggtcaggagttcaagaccagcctggccaagatgctgaaacmccgcctctactaaaaaaaaaaaaacacgaaaaaaaaattagccatgcgtggtggtgggcacctgtaatctcagctactcaggaggctgagggagataattgcttgaacccaggaggtggagggtgtagtgagctgagaatgcaccactgcactccagcctgagtgacagagcgggattccatctgaaaaaacaaacaaacaaacaaaaaaaaataggaagaggaaacctctatgttgaggatgcctggcttccaagtatcccttttctatttgcataggtgccagcatttagctatgcaagtttttagtttgcttatgtatgcttgtggcttgattttttaggctgatttttgctagaaaagaaattatatgggggctgctttttattaaaagaaaaaccttaccgaggactctcttacctacactaactgcttaataatttctttttagctcctgtatcagcagtgcttgcacctcataggtgatgatcatgagggggacaaggagcctctagacttaagagacaagttgccagcattctccagatggagtgtttccctcygcagcaccccctgctggtcagtttgacaagcaggtgaacagaagttctcaaatacacagtaagcagataaccccaacatcaccagaaatakcaagttgtgatggcattttggcaaattgtctttattttttgtctgcatcatctgttgctttctgagggaagttttttgagttctcccactgagactgtggatttgcatttttcttttgtatgtccgtcagcttttgccatgtatagtttgtagttgtgttgtgttgaggcagattcatgatctatgttgtgggagaatttctgtatttagcagatgttcaacttacgttctattttgccaagtgttgatggtattactttgcttttcagtttcacattcatttagtatatctttttcctttccgtgaacacttgtgtgttatttcagatatgctttcttatgtactgacagtgacccccaaattcatatgttgaagacccaactcccaatggacttggaggtgggcctttgagaagtaattgggtttagattaagtcataagggtggagcccctatgatggtattaagtccttctaagaaaaggaagagagtctgagctctcctctgtctctaccatgtgagggcacagagatgtatgctttttggactttgtttttaactcagtatgaaaaacatatattttaataagaaaattaccccattcatttttagtgcgtttattgataatgttggacttacttgtgccatatttaaggaatcctctttcctctttcccatgctttcttgttgttttttcaatccaagtgcatgataaggtttaggaatcacttttttaacagggccaagaagggctagataagggaagctggcttgtgttcagggaagcggcagaggagggaagctggcagctgggctgtgctaagatgaccttagccccagaccctgratgaacatcctcttctggatacaggacctgcccgaggcaccattttgaataggcaaatcttattttctttgtgttctttcatcatctgtattagcttttgcctcttgagtgccaaaatatagctgtttttatatgactccaagttcctgagtttattttttaggtaagaattttccaccctttgaaatcccaaatgacatgtttactctctctctcagaccatgctttcatttcagtcaatgtaacaaatcagccaggtctcaggagtttagaaatctgattggattgatttatactaagatgtaacagatctaccatagccttctaagatgaattggagtttcttaaaaactccatgacctacactattctttaggtgctggaattgcacactttcaaatcgcatcaagtataaacattcaattttgtggaggtttattttttatggagagatgaggtgttgtttaatactggtagactttactccaaaagacaattctattaagatttcttttgtttttttaaaatctagactatcagaaggagtaaaaatgccatttttttttctttttgctgtggctacaatgttcacagtaatccaagctccaatgacagggtgggagagcagagccaaatgaggccacgtttttttcatgaagagtatttttctttttttttttttgagatcagggattcagattgtaatataagtgttcaattayaaagttattatgatagtgcatggcacgtgccctttccatcatctggatttttccacttttactgtatggctcactcttactcactctccagtcttcaccttagtggtctcttctccctggaatgcccttgaccccttaagatagcagtgctgcaaacatcaaaagctgaatttataaccagactcacaggcaacaccttgtcctgtgccatgcttcactaatgatgaggaagtgagaaagagtaggggaaaggaggcacaacaaatgtcatttccatagcagaggcckcaagaccagcccacttgattctctggagatccttttctgcataacaatgatgaaaggtagcctaggaaagccatttgtctgaggcttcacctttgataccttgctagtcactaaactaagagactgattccattctttagtatagccattgcctcataaatctatacatagcaggggtatttctttccaataaagtatccatatagattaggtatattctattgacaattttattaaagttcttcaattatcttccagatagtagattctatcaatcaagtttcataaagagttctgattcccagaggtaagaactgagcctggctttctagttacatgtttattggtaactctgtccttccctacaacacttaagcatatttaaagactataccctcccctgcctccagcttggattgtaagctcctcaagagcatggctgtgtcctttaacatcaggtctccatgtgagaaggagttcctgccatatcayaaatgcccaatcaacatttgtaagtgaagaaagctattctgtggtgtctgctttaatattaagagatggcttgcccaagattgctaagcagcttcattgtctacaayggaacaagattctgtgggtagcaggtccattggtgccactgacaggaggcctcaaggaaacctagtgccttattcattctgatggcgccttgattttcttccagcacagagccgtaaaatggaatattcttctgacacagatacttcatgtatcgcaccatcatccgtgtcgcgttgcctctccttcggtatttttccacactgtagcccattcctatttcacaagaagggtccatggttacccatgagaccgggaccccctctgggcccagcatacagactgctggcagggctcctaggcagcgcttgatgtaatgcaggctcctcttattcatccctagcttccagttgtcatttaccagcccagaataagacacattcagctgggcatacttaaaattgggagtctcgctgtagaaaacaaaaagaaagacaacaactttcatccccactcctgtaatttctaggtgcccttccattctagagatcccaggccctcttcttgttaaaagacccaccattgcaaagtggcgtattttgaccattgacaacctttattcatcccaaggaatgaattcatcgtctcttcattccaaaactgatttatgtgaattacaaaaatgtacaaggaatagcaattataaatgatcagcacatgttttttgtacctctccaattcgtcatctgggtggcctgtctcagcccagcttccaagcttgcttttattggtggcatagagcttcaggatatcttccgtaacaaagaggagtgctctcgaatgctctaccttcactgaatttgaaaatgcagctgcttttatcccctcacctaaactttcttgaaaacctgagagaaagccaagaaagcaatattgtcagacatgcagttctctacttacattgctcccacctgattaatacctcagtgcttagtagttttcaaagttgagtttacaccacaatcagctatagtccttggcacaccacagattgctccacctctcccagctcagagagtttctatgaatttacatttctaatgagctctcaggtgatgctaatgctgttagttgaagacacaatttgagaagcacagctgcttgcccatttcttcagacttgttaccttggatttggagtttctgtttccagtttatgatctcagaatttttcaaaacttcttgtgatttttgagggtctttggagaatatacgatatacattagtgtatgaatccatgtcatcagtcatctcctgtgtaggatggtgaaaggtcaggtcattcccttgaactttttcttctcctctcactgattgcaattattagaaaaatgacaattgaaaggaaaattttaacaccagcccacgatggctgcagttgggcacatggataatagaaccaaggcctataagctactgctgacctcttacctgtttaactggagtttgttaaatattgaacactgacaggtactggttataaacctgcttatcagatgcataacaaagacaggatgaaatcagtcaccttccaccaggccttaagatgcctcacctttctccctacccactcaaccgcacacttaccttattttatatatagcatcacagagcgcccagcagaagcaaaggaatgcaacaattgcttctctccctgcttctctcacctcctggaccacacatatccccctgttatatatactgtgccccacataaccccctgtgggacatattctgcgttgtactgagtccgtgttgatagggttaagttcttaaacttggcacaagatgaatttaactgtgatttctctaagttttagtgcctactgtttcaccagacacctacaatctatactgttttagaatctgcagtgtccagggtttgagcaagatactttagtgaatagaaacattaaggagacattgccttttcccaaggctacaggatatcagcctctttgaagagtgacatggcctttacagccaraagcccacaaaatagaatgaagtaactgaattttcggtagcactctgcacaatttatgtggtgttggactcatgggttttaaagaaagagacttgtgatcccattctgacaagccacaaacttcatgggacgatgtgtatctgtttatcaggggaaatataaacaataagtgtgagagttttagcagtgaatgtattaatatcatgttgaaaattttatcgttaaggagtaaaagagaaaatagtgtaactaattttaaggaaaccttcaaaaatttgggggtgcttttataaatgcaagttcctgaatatggccaaaacacaacacctcagtgaatttaaaagagtagaagttttaaaagacccgattttaaaagaatgtcttaaaatagccaagtaaatattcaaagaattataaagagaatatcaaagtaaaccagaaaataactaatggaacaatttgtaaaaataaaagccataaatactgaaatgtagaaagttcattattaaatgggaaaaagagaaagagcagaagagagagataaacttctggtaaggcatttaaaggaaatagaagagaaagagaaaagagaaaaaaaggcatagagtatgagccatgagaacggaaacagaaaagaaaaaagacttataatagaagattatatactccaaggcaacatattcactgataaagaaatggatgttatccctcaagaataaactatcaaaattgactttcaaaaaatagaaaacttcagtgaactaatagaaatatcagaaatgaaattaaacatctaccatttgaaaagtggacaagaattatggcctccagctccatccgtgttgctacaaaggacaatattttattcttttctactgctgtgtagtattccatatgaatgtatgtagcaagttttttttttatccaatgcacctttgatggggatctgtgttgattccatgtctttgctattgtgaacagtgcagcaatgaacatcctagtgcatgtgtcattttggtaggatgattcattttcttttgggtatttacctagtaatggcattgctgggtctaatggcaactccgttttaagttctctaagaaatttccagactactttccacagtgtaataatcctaagcaaattaatgctgtaacagaaaatcaaatatcacgttttcactcataactgggagctaagcattgaccatacatggacataaatgtgggaacaatagacactatggactctagagggtggagggaaaggggctgggttagaaaactacctatcgggtactatgctcactaccagggtgatgggatctgtccgtactccaagactcagcatcatgcaatatttgcrtgtaacaaatatgcacatgtaccccctttatctaaaaggaaagttgaaattacaaactaaaaagtagccaaaattagattattttacatttcaattctacataagrcaaaaccaaacacataattttaattgtattgtttggtaamagatgaaaakatcctaatgccaaatctggtaaagaaataacaaaaagagagttactgaccatattggcttatgaatacagatgcaaaaattctgaataaaatattcagtagcatatgaaaagaatgtgaacatgaacagtttgttttagaaaggccagaatgagtttgatcagaagatcttttagggtaataaattaaaggaggaaaaaattacatgagtatataaatttccataaaaagacaaaaatgaaataacataaaatttaccgttcattctaaatataatttctatgaaartgggaaaacaggaaagtgctctaagcctgtaaagacagaattaaatgtaattttaaaggtaagtgtttatagctatttcattagaatcaggaatgagacaagaatagaactattattatggttatttgatattgttttcttaggttgtacattatacaataaggcaagaaactaaaaacccatacaaatattggcaaagaagcagcaaattactttgtttatagattacagtattacacatttagaaaatataagagacttcgacagaaaacaatgtagtttacctcaggaaaacactaatattttaccagatggcatagaacagaaactgaaaaaagtgagagaaagaccatatttcttgataaaaatatttagtatcacaaaaatattaatgcttccacaattgtctaaaaaactcctccaatacaaatcacaattgcaatacttagttgggggaattggggaactgaaaaattagtttttgttcatatagctcttaagtttataagaaataggaaatcaagaaaaacattagtgaagggtgatttgctttattagatattaatatttaccacaaaacattgaaatagcatgagaaaagactaaaacaaatacagaaatagctacaaaaatatataaaaatgttacatgacaaaatagacatttatgtttcagtagcagagtgacttatttaataaatagcactaatgtaattagccagccataaggtgaataaatataaaagaatgttaatgcatgctattcaaaaatatattscaaatagaatgaagtttgaaatgtcaaaagtaaaaactcactgtaagacaaaatgaaaaaaacaacttgtatgatcttggattaggaaaaatcttcctaattattaacaaaaaaacccccaaagcctcaggaatcatagtgaaaaagataatatatttgattacatgaaaattaaaaattgcttcatgtgaaaatctatcaataaaatagaaaataattctmaattgggcaacaaatttgtagcatacaccttgtgttagtatccctcatatccaaaacacatagagaattttaagaatgacacaaaatcccagtgtaaaaatggtcaaacaatataaacagttcagaagtaaacccaaaatgactgataatcatatgaaaatatatgttgaatatcactagtcagggaaatgcaaattaaatctacaataagatgccacttttcacccaccagtttggcagaaaktagaagaaggataacattcagtgctgrtgagaatgtgggaaacaattcttccacaaattgctaatggaaataatactgtggaatcctttgggaaggtagtctggcagtgcctacttaggataagagaagctcttacttggacktatcccttttggaaaccaattgcattgagaaaagtttccaggatgtaaagacatgtatacaaggatgtttactgaagcattgtttgtaatggcaaagaagtatgaacaatttgaacccaacaggaggagaatgactgactagcattgcattgactctatggaacaccacagttactaaaacgaaaacgttagtgctgtattgattcactcaaagcaatgtccatatgtcaaaggcaaattaaaaagtgatgacagtttgtgtgttaatatgggcaaggacacygattaccccaaagggtaggaatggaggagaggagggcaaaggaggtgagaggttattaacttcttaaaatcatrttgratttttccacttstataatcagcatatattatctttctgattaaraaccaagaaagaaaaaattaatwtttttctagagaaattctcctgcatctcaccttaaaaaggtcttcttcaaaattgcatygattttcaatactgaaagaaacgtggtatactatggaatcagactaggtgaatgtatttccaagtaaattgcagcatatttcattctttccatttttttggtcatgtatgtgtggcatggaacttttatattttaatatttttgtttactgactcactttataaaaactagccttgttcaaagcaatgcatatatgaagttacagcttgatggtgcagttacattgttaaaatacacatagtaactacaaagttactgaagtaaaaagaactatttgacctcatacagttatttagcatatcacactttgaagaaattggaccatggatcaaataaactaagcattaatcttccatctgaaattgtcaggaaacctkgagatcaaaagaacatccctgggaaggtrttaggctcagcttattattatgtgggggctcagcgtctatacccacctgaagctgggctgkccatgaggcttcagttcactaaccagatgtgcatgaaacagatacaaaaaggggaagcctttagggccaaaaaatagacctaggtttgtattactatttcagcttaatcgtgtataccttgtgtttcctcggccaacaatggctaattatggtaaatactatttagaattatgtgctatgtactaagtgtttgacatatggtatctcatttaaaccttctgtgatcctctgaagagtgtcctccaatttttcccattttaacagatgataaaactcacagaagggcctatggttatatagctagtaaaagtggcagagtccgttgaacttgaattcagattggggaatgctttaacagttggtatccagcagctacaggacttaatatttctcagtgttgtttcctcatctctaaattgaagatattaaagctcactttgtaaaattgttctgatgatgacagtcactaatgagtgaggtgcttccaaacagttgacacacagtaattgtgtgccccttccctggttcctgagaagcaacttttatttttttatgacagggtctcactctgttggccaggctagagtagagtggtgtgatcttggctcactgcagcctcaaccttctggggctcaagccatcctcccatctccatctcctgagcatctaggagtataggcatgtaccaccatgcactgctaattttgtttatttttttgtagagatgaggtctcactatgttgcacaggcaggtcccaaactcctggcctcaagcgatcctcctgccttggcctcccaaaatgctgggattacaggtaaaagacaccatgcctggccatgagaggtaattttgctggtagactactsccttggtttttgtttctaaatcactgttctgatatctcagacacacaactttccctgtaaattggcctccattcagcccctgcaggtgacccctgccacctcaaagggcccttaatctgtgagtgtcagcyttgtccttttcctccccttcccccttgaacccctttcccaaattagtcttatgcttacgggaagagtgttaacatgtggcattcatgcaagctgctcattaacgaaggagtgttttaaaatactcacatttcctttcaccctatgaaagcagccatggtgtctgaattggacagttcctcaggccctttggacctgcctggctccaccagtccctgtctgtgtgcctacctgtttttgaggtcggataataaccatctgatacycgggccaggagtccaccaacacctccatgttgaaggggttcccgtgattgatgtgaaacagagagccatacacctgaaggagggatgaaagggaataggagaggttgagatccccagagatgggggtctgtatgtgaagaggaagagaaaaatggaagtcaggagacagcactgggaccaagtyggtgatagtgtgatgagcagcatctccaggaccatactgatggacrtgaagtcaccagcaaacaggcagaactcmcagggaggtgtccttgtgataccacagagctactgtgcagtagctgggcacttgacaatgcacttagcacttatattgtatggattcattcagtgtccacaacaactttaataggtggctactaatattattcccattttattaatgaaaagaccaaagataaaggcatagaaagctaaagrcacaggcacaatgatatctgactaaaaaatggcagccttgcaatgcatatttattgaatctggccccaaaccgatgttcgtagccaccattcttcaccacctctccaaatgagtgataaaatctgcagagtcggcctagttgcctgttgccgaggagaagcagcagctcttaacatgcctcctttgtccccaaccccatcctgtttcccagctccaaccctctgcacaaagtcaggaaggacgagattcttgggcctgttattttctcatcctcaacacccctactcccataccccaacctcccactgttccttcaccttcagggactcaggaatgctccttgctaaagatttgaatagggccagcagctgctcagaattattcaatagaatcattttgtgggatgcttcagtcctcgagcccttcaagaaaaaactctgaagagaagtgaagggaaaatgttaaaggaccagatgaaattaaaatgcactttacacatctccattcaagtaacactcatgatgtaggtactgttagtatcgtcttcattttgaatacgccaaagcttagagagactaaataaatttctcaagttcttacagggataaaygacagagtcctatccaaaacccatgcatttcctctctggtggaatgaattaaaagtgaatattaagagttctgtgagcytcccacatgcctgtagcagaacactccaccaccaccatcataatgtttcttttattttggtcatcagatgcctgaagagtcttctttcttctggaataggaaatatctaagaacagttgtgactggaaacctcagagcaggagttggcaaagattttctttagtttcttagggccaaatatttcagatctataaccattttgaaatttttcccagtttcattacaaaaataagaaaaaagcatagaaaatttggaaacatatctgtaaatttcctttgaaataacacttggaattcttttttttttttttttttttttttttttttgagacggagtctcgctctgtcgcccaggtcggactgcggactgcagtggcgcaatctcggctcactgcaagctccgcttcccgggttcacgccattctcctgcctcagcctcccgagtagctgggactacaggcgcccgccaccgcgcccggctaattttttgtatttttagtagagacggggtttcaccttgttagccaggatggtctcgatctcctgacctcatgatccacccgcctcggcctcccaaagtgctgggattacaggcgtgagccaccgcgcccggcctaacacttggaattcttacaaatgtgccaaagagtataacagttgacattctatagtgccaaaccggttcttagccaaaagggactttactgagagccctcatttttaaatgtagttcaatgcattgtttttcatttggaatgttccactctaagttatctttagtaagattttgccatttgtgtaagacttctctgccttccagtcctaatgtataagccagaaagaactcagtttttcagaaattaaggattccakttttacataaaatactgactttactctcaggttcttttgattaacttarccaatgaatttycctayctaggtacacaagaaaaatgaaacaaatgggtagaacacaaaaatccctgtgaatttcccaaagccgaattttatgactgctgcgacattactgcttactaccacttcctttatgacccagtcagctgttagtggcctctactgttagtggcctctaagtggatccaagccagttaattcccagatcaaattcattcctagacccagtccattttctgttgcaactccaaaaccagtttggatcacaaatttgcacaaggaaactcagagagctcaaaacacaaatgtgtgaagctccaaaatgcaagagggagcttacctttgatcctcagctgctctgagagatcagtggacacaagtggatcccgcaggtaccttctgtgtttactcagtgctcctggggatactagaagctccacttcagattctgcttctgacacaatctgataaaataaaaacttcagctgacttaaatttaaaggagattagttgagcaatgaacaattcatcgatccagcagccttcagaatcacagcagattcacagagtttccaggggtgccttgtggtcaaaacaaatttatagggaaaaaaagttaaagtgacatccaggaaccggaaatgagttacagaaacagtgagatttctgtcacctgggcgtttgccttatttaaacacagtttgarcattcagcagtctatgagtggtgatgtaaggctgctgggactggccagcattcaaatattgttacaggtgcagactcctaaattaggttttcaattttgtctattaagctaggttactctacacccacaagggctcaaatgaagcacagagtccttctcagaccatatttagtttgctttaacactctgtagcaaaattcattgaaaggattgtctacaaatgctatttccaatcctccccctaatcttatctaactgggtttttgctgctaccattttactgaaacattttttaaatccatcagtgatctctatgttattaaatccagtggtcaattattgcttctgttcttaatagatcattctttaagactttcttcacttggtttccgagaaaacacactctcttcttttcctttaacttcactggttatttctcagtctcctctgtggacccttcttttctccccaacttcttaattttgcatcactttagagttcaatcattggccttcatttgtatccacacttactccctagtaatcacatctgttcccatggctttaaaatcaatctgcttgccaatgactaatacatttatattactattaaaactcttttccaaactcaagacatatgtatccaatagcctgtttgatatctcttggattccacccaatagccatctcaaactcattatgtctcagatcaaactccttatccaccctctccacccagcctacttcacctgtagtctttctcaattaagttgatggcaactccaccttttcacctattcaaataaaaactcttggaattattcttaagtatcttttcccctcccactttacatccaatccattatgacattctgctcattctggttgggagaaaagtcttcatggcctctcacatttctgcatgtcttaggagcagagacattgacagcctttgctcctatcctttcaaggatgtttgtaaagagtacagcttggaagctggagatactgctttcttctgaagcagaaggcagttttgctgcaacacacatcyattgaatttgtgacattaatctgccttcctgtatttcctctgtaggacttgtggagcaaagatgactgacacaaacatataaatcattctgcctgttgaaggcatataaaatcctgcctttacctggaagcttgtgtcatctgccagcatttctgcatctgtgcccctgtaaacttttagatgcttcagagttcttggcagtcttttctggatggagaatgtctttagtcttttctctatgtaaaaccagaacactccttttaaaacaaaagccacattttgttattcgttgtgcaagtcctgctgtcactcccaatctcattcagagaaagatatataaaagtcttataacagccstctaagttctccatgacttagaatccagtcacctccctgacatccctccagtcatgtccctgacttcaatctctttgccttctctgcttcaggcactttgctgtcctttttcttctgcttgcattctgttttctcattatacctatagaaaaccttattaccctctttaaatcttcaccttaaagccacttgctcaatgaggcctcctctgaccatcstattaacaattacaactgttcccctagtttctctgcaatgctcctgtgccccattgtcattctctgcctcttatctttttcttttttgacagggtctcactctgtcacccaggctggagtgcagtggctggatcatgagtcactgcaaccttgacctttcaggctcaagcatcctctcacctcagtctcctgactagctgcaggcatgaatcaatgtgcctggctaattgtcttatttttatgttatagagatggtggggcgggggggggtcttcrtttttcagactggtctcaaactactggttatagttttataactttctgtgccacactctgatrccccaaaatatctagcagagacaaacataaaaccccgaaaaaatgtatgctgacaattctgaagacatttctatttttatcttacaataattttaatgctagcttcttaaaaatttacttaagtaacgtgaatgtaaaaaatactttggacttatttacttaatctaggagtgttcttttatgtataagccaatttggtagtcacaacatataatgtaatacatgtgcatacacataaacacatctagatgtatatacacacaaagatccaaaagcttttaccttggaactctagccatgagatagtaatacagtctcaactgtctgcaaacatgtccacatggctgaactttgttagccttgataggtaatccagggaaggctgtgaamcaaattttaaataaaakgagttwctgtggcagtttgatttttaaaggccaaaactccctatactcccaaaacactggggtcaaaaacggcaccgcatgagatcatcacatattaacytggccygaccctgcttaaaacagcagcacaaaakcccactttcccattcaacagcaaactccagattccaaactatactggagccaaacagtgtcacaaaagagtaccagtttatcaaattcgaatttcccatgactgtatcagacacatgcaaacaattactaaaacacaatccaactgctgcagcatcaaacaagccccaaaagtctacaatgtgaaagagttgtggtgcttcctctctccattggttgggctcaatcgacctgaaataaaaattccttcagaatttctcagatggagaggagcwgatcccactgtctggttcccacaaatgacactcacttgcctggatacacacacaatgacaaacaagctcctaagagtgkccgtactgaaatagtcagggtacttccctctcttcatcaattgggcttgttcaacctgcaagtggaaattcctttaaaaatttcccaaactgtgaggaggagatctttctgtctgggcccacagaggagagtcacctatctggatgcaaatatcaaatttcaaaggcagttctcccaaggcaatcaggaacatggttggggccagctgtggctggccctagagagagggtactcatctctagccaaaattgggtaagcagctgcttaggaggactttgagattccccgcccatggtagctgagccaaagtgttcctggttggggaatcaaaatctgttagtgaaacaccaggggtgtggtctagctccagctgctcactgcacagaaaaccaattcatatcaacaattcttgccaagggagaaggctgaatcagatgctgtaggagaggagatggtagttcagtgtcaaatccatctccctgaccagctaaaattatgagtttacatagcagggaggaaawgtaaccatgtgtagaaaaacaggaactcaggagacctaaggaagcaatcataatrtatgaggggtctggtgtgccatcatctggatggaatcatctggtgaatttcagttcttttatactttttgagggacctaggggtcctttaccaaggatgaaactcatagaaaacaaataaaagtttcaagctttaagaccagaatggtcaatttctatgtttatacaaaaaactatccatgggactacaggggaggtttcatttcgagtgccagtgctagctgcagtcggcctcaagtctgcctaggcttctgtcaaactgtctcaggaccttggccaggagaatagcttcctctcccatctgtgggctcctctcccatctgtagggctgctgagatagccaagttcttagaatacctcagttccagagcagactcctttgtatcagcctttcagaccagctctggactctctctagatctcagcccrtgcttatggtgtgcaggggtataaggcggaactagacccctatgacttcctcccagaaacacatgctatctgacagagtggttactctgcaagactccagcaggggattctccaagtccacttctctgatgtagctaatctatggatcaaaactgaaaggtttagccttctgtgtcactgcttctgggccctctgggcctagctcagctctgatatcagtcccatcatactcagtattagtcataagtgacttcccgaaacactcatkgcagcttggattctggcacaaacatgggatctctgaatggaagcaatgaattctggttttamtkgtgctgaggttatgctaatcagttttggggttttcagtctgtgtgagagatctctgattctaggtctctccaactgcttagccctgaatcttcttccaacctttgggaaaccacaggtccttcagggggtcatggtggagtagacacctaggatacaatttaggcatggccccactttcaaaaagggtcccaaatatgagattccagctgtatcaccaatgatatcacccattgaaactcaggcagaatgaagagaacacattcaccatyagttacatgctggcagaagtcraccctgaatcaatgctttataattcctgtactgatcttgtgagtagaacaacagtattgcatggcatttttgtggttgtaagcatacatttataaaatacacagattttaaagccattatattatcaatgttttgatctatctttattttttggtatacttcatactacaaagagtggcaataagctggccatctttgaacccctgtgaagccttgaaactgttgctcatggcagggaatggggactgcatggctgagtgtctgtgggaggctggtggagatgctccctctgtgtattctcacaatgtgtcaaggatctctgggatgcttcgttcatattaatgtccttaattaggcccattccacaacctagccagcccttgtagacacaggttcaatgcccacatcagagccatgtcagcccctgtagacatgggcttcattccagcccctactggtacaggctgtatgcctgccctgatagacataggctttatgttcatccccacatacccaatgaaaatatccagccagtggatataggattcaggcccaactctacagacccaggaaccaagcctaccacctgctgacacagacaccaggccagcctgcctgaagacttcagcaacaagttcacctgcacaccacaacagacaccctaccaagaattgctggatgactggggaaaggtttttccagacaaagccagtatgcaaagactggaataactttcttgtttttcaaatrtgcagacaccaatgcacagcctaaaaatcaagaaatataagagaaaaatgataccaccagaggaaaaaaaagaatacccaatagctgaccccmaaaaataaagatttatgaactttctgacagtgaatttaaaataatggtctttaaaatgctcagtgagcttcaagagaacacagatagatgactaaaaagaatcagagaaataatacatgaacaaaatagaaagttcaacaaacagaaagaaatcattaaaaaagagacattctggacataaaggacacrayggttsaactgaaaatttcatagacttctttgaaagcagatttgatcaagtagaataaagaatcaataaactcaaagacacatcatttgaatttactgtcagagacacaaaaggaaaaaaatgagaaaaaataaagacatcctatggcaattatagaacatcagtatgagaaccaatgcacacatcatgtgtgtcccagaaagagaagagaaacacatagggaaagaaatcttatatgatgaaataataacagaatactttccaagtctggggaaagagaaatatacaggtataggaatattgaagatgtttgatatgattcagtcccatcaagagtacaagaaatattttaattaaactgtcaaaaatcaaagaaaaggaagattctggaaataaatgagaaaacaagcaaataatatataagggagttccaagaaggctaatagcagatttttgaggagaaacttataggctgagagcatggaatgatatattcaatgttctatagaaaaaaaaagtgtcaaccaaaaatacgattctcgggaaaatctgttttttgcaartaatggaragattaaaatctttgccagaaaaacaaaaattaagggagtttattaccatcagagctgtcttacaggaaatgctagagaacaaatattaggacacaargcatgtcataataaatttaagaagactgaaatcataccatttatcattccagatcacaatgacatgaaactagaaattaataacaggaaaattttttagaaaactcacaaatacatgaaaattaaacagcatgcttctgaacaacagatggattaaagaggaaattaaaatggaaatttaaaaatatgttgagaacagcaaaaatggaaactcaaaataccaaaacttgttagatgcctcaaaactttcacactgaaaaagaagaaagatcttaaacaacttaatgttacacttcaaggaggtataaaaagaataaactaagtccaaaggtaatagaatgaaggaataaataaaggttggggcaggtaaattaaatagaaactatgaaaacaatgaaaaaaaaaaaccctgaaatttgatctttccaaaagttaaataagattcacaaacctttatccagactaagggggaaaaaaaaagttaatcataaacaaaaaggagacatcacaacttacatcacaaaaaaatcagaagagactattatgacaaattatatgccaacaaattggataatctacaataaatgggtaaattcctagatacataaaccccaccaagatgaagaaattgaaaatctaaacagaccaataatgagtaaggtggttaaattagtaataaaaaatattccattaaaggaaagcccaggaccttatggcttcactgctgaatttcaccaaatatttaaagaagaactcatgtcaatccaatctaaaagccttccaaaaaattgaagaagagggaatacttccaaagttrttttacaaggcaagcataatcctgataccaaagatagggacacttcaacaaatgaaaatattaggcaatagcactaatgaacataggtgcatcaataaatattaatactaacaaactaatcccaacarcatgtcaaaaagttcattcatcatgatacagtgggctttaacgtagggttgcaaagataattcaacatacagatctataaatgtgaaataccacatcaacagaataaacaacaaaatccatatgatacttgatagaagcagaaaaagcatttgatagagttcaccatgatttcctgattatgaactctcaacaaatgaggtatagaaggaatgtagctcatacaataaagaccatttatgataaatccaccgctaacattacacttaatggtgaaatgtgaaaaacatatttctaagattaagaacaagacaaggatgctcactctcactacttctattcagtgcattaatggaagttctactcagagcaattaggcaagagaaaaaaataaaaagcatccaaattggaaaggaagtagctaaatatgtccctgtttgcatatagcatggtcttatatgtaaaaaatcctaaagactgcagcaaactaggttaaaactactaaacaaattccgtaatgtggcaagatacaaaatgaacatacacaaatcagtagtgtttccatacactagcaatgaaagacctgacaaagaaaaaaatcctgtttgcataagctacaaaaaataaatacttaagagtaaatgtaaataacgtggtaaaagacttatatagtgaaaattatgaaacatatatgaaaaaagtgaagaaaacacaaataaatagaaagstatttattatttatagattgcaaaaattaatactgtcaaaatgacaacaatgccccaagygatttacagattcaatgcaattcctatgtaaataccaatgacattcttcaaagaaatataacacaccaaaaaatgtatatgttatcacaaaagatccttaagagcaaaatcgatcatgagcaacaagaataaagctggagatatcacactacctaatttcaaaatgtactatgtagcaatagtaatgaaaacaggattgtactaccatcaaaacagaaacatgaaacaatggaacagaatagaacgtccagaaataaatccatgcatttaagatgattgattttgacaaagttgtcaagaacacgtgaatggggaatagacagtctctttaatraatgctgttgaaaaaaactgcatatccacatgcagaaaattgaaattagactttatctcacaccacatacaaaactcaaccccagatggtttaaagacctaaatgtaagacctgagactgcaaaaccactaggacaaaacatgggagaaaagctttgtgatattagttgtggcaatgatttttggatagaatccctaaagcacagataatgaagggcaaaatagacaaatgggattacatcaaactaaaacagtcttatacagcaaagaaacaatcaacaggatgaagaggcarcctatggaatggaagaaaatatttgcaaaccatacatctgataaggggttaatttttaaaataataataaacttaatagcaagaaaacaaataatccaaattaaaaatgggcaaagaccctgaacagatctttctttctttctctctttctctctctttgagttgcttttcctctttactagtttgtagtaatcttaaaaactctatcacatccataaaccaccacaggtgagaggatgatagagaatgaatgctacagtatgtggacagagtggggcaatccaggtattccctagggtagtgtggaaagggggcagggagtgtgaataggaggctgtcgcttggttccttattgctggatgggtgttggctagcagaggagagagggactcaaactaaactaggaaatagggaayatctcacaccaaaggcaatgacagtagggggccagggggattaagtacattttctacacagactacaggggtgagtgagagcttcagagacttgcaccctttcataggaagaaatgggtttgaggctgtttgactgaaagctcccaaattggtatctggtccaatttcctaaaatggcagctcatcattcagggagaggtactgagaagaaaagtatagcacgagtatgtggtttggagatgaagtaagggataaggggagacagtggtactctctaaatctgactcagataagcaagaattggaagagggccttgggtgaaatggtggccaacactttgggagaagacattgcaccataagctgtaggtactcctgagggctcagggacacggaagttcacattaggtaggaaaacaactgagaacaataaattaggacttcatgttactgacatctggcataatataagccagctaattttttttcctttttaaatataaggtaacatgtcaacacataatttaaaaactggtcttcagttgcattgcttctgatcactagagaattcctggctaaagagcagtgaatagtaaacaaaactcaacatcttaagaaccatcagctcacattcccgagagacaagtggaaggggaagggcttatttgakccaataattttttttaaagcccaattctgcatctttaagagaagaagggtgtaaaaattcataacaaagcataatctaagtgtaaagttacagaaaatatttaaatttctagttaactcattgccacttgagaatgagacataatgggcatggagtggataaaggggtgccctaagaataaatatggggtaagaggggctgtttccaaagtaggctcatctccagttgttaaaaccatgctcattaggtaaaggaatcactcaagaacattaaagctttctggagtttctttttccccccactttcttctttaaactgaggggctgcactagaaggtacttgtggagccactcacacacaatgctactcaaatgcacactacattcagacacatgacattaaaatttatactgtagagcaatattcttagccagtgtagagaaaacaagtgcattttaacttttttctttttgtgtgtgtttttaatcccagactccaatgtgatccatcattccctacctacctaattccttgagtaagctattttttgtttgtagttttgttttgctttttttattttattttttatttatttattttcttgaggagggggaagagtagggaatacggcagcaggtatgtcaggagagaggcaacagtgagaaagggatcttggttatggggaatggtcactatrcttatctagatttggaaaggcaagtctggagtcaggatgtcaatacaaaaacagatttcagtgcaatgaaaaaattttgaaggaaattaaaagtactagtccagtgtaaacaggaatgataagtagaaaaatggtcttattacagttttggagaaacagcaataagacatcaacacaacctagggtagtggctcacacgtgagccctggaaaggaggtgaagttcactctgcagcacttgtcctgcaggttcgggctctgggctgtgcaagcatggggcagctcagcccacttgccctgccacaaggggatgggtgagaaggatgagaaggggcttctccaggtctaggcagtgggaggaggaggaggctattccgggtgccagaatcatccagcacactactctctggtgtgcagacaccccctccccagccggctgcagctagcttcccaccgccatcctgaatagacatttcgcaaaagaagacatataaataactaagggttttttttttcctaatgctcaacagtactcattatcaagaaaaggcaaattaaaaccaaaataccacctcgtactcgatagaattgctattatcaagaagatgaaagatcacaactgttggggagaatgtgaggaaatgggaacccttgtgtactgttggtgggaacgtaagctattgcagccttatgcaaaacagtacagagrttccttaaaaagctaaaaatagagctaacatatgatccagcaatccctactgcatatatgtttaaaggaaatgaaatcagtacaggcacacctcattttattgcacttcactttatcatacttcagaggtactataaaggttctatttacaaatagaagttttgtgtcaaccttgcatgaagcaagtctactggcaccatttttccaacaaatgtgctcccttcctgtctgtgttacattttggtcattcccagaatattcacactttttccttgttattgtgtctgttaaggtgatctgtgatcagtgagttttgatggtgctattttagctgttctggagcaccaccaattgcacccatataagacagcaaacttaattgataactgttgtgagtgttctcactgcatcaccggctgaccgttcccagactctctccctctcttccagcctccctattccctgagacacaagaacatttaaatcacatcaattattaaccatacaatgatctataagtattcaagtgaatggaagggtcacgagtcttttattttaaacaaacagctaaaaatgattaagcatagtgaggaaggcaggtcaaaatctcagacagtccaataactagatcttttgcaccaaacagttagccaagttgtgagtgcamggaaaaatctttgaaggaaattaatagtgctaaaccagtgtacacataaatgataagaaagcaaaatagccttattgctgttttggagccagttttagtgctctggatagaaaattaaactagccacaacattcataaaccaaagcttaatcccgagcaagactctaactcttttcagttatttgatggctaagagatgtgaggaagctgcagaaaaaaagttggaagctagcagaggttagttcatgaggtttaaggaaagaagccattttctctttcttttctttctttctttctttctttctttctttctttctttctttctttctttctttcttttcttttagacagagtttcactctgttgctcaggctggaatgcagtggtgaggcgatcagggctcactgcaacctctgctcctgggctcaagtgattctcctccctcagcctccaaagtagctggaattacaggctcccactaccacagctggctgactttttttttgtatttatagtagagacggggtttcaccacattgttcaggctggtttcaagctcatgacctcaggtgatccaccaacctcagtctcctaaaatgctgggattgcaggcatgagccaccgtgcctggcccattttcataacataaaagtrcaaaagggaagcagcaagtgctgatgtagaaacggtagcaggttatccagaatatctagctaagataattgatggaggtggctacaccaaacaacaaatttcccatttagatgacacaggtttctatcggaaggagatgccatcaaggactgtcacagctagaaaggggaagtcaattccaaccgtcaaagctgcaaaggacaggctggctttcttattagcagtttatgcagctgctgactttaagttgatgccaatgctctcttaccattccaaaaatcctggggcccttaaggattatggtaaatagacttcacctatgctctataaatggaagaacgaagcctagattacagcaccatctatttacagcatggtttactgaatattttaaggctactattgagacctctactcaggaaaaaaatattcttatgaaaatattactgctcattgacaatgcacctattcattcaagagctctgatggagatgtaaaaggatatttttttcatgcctgctaacatacattcattctgcagctcatagatcaaggagtaatttcaactttccaattcttattatttaagaaatacattctgtaaggctatagctgcaatacattgtgatttttctgatggattagggcaaagtaaattggaaacctcttggaaggattttcgattccatatgccattaaaaacattcatgattcatgggaggagatcaagctatcaacatcaacaggaatttggaagaaggtgattccaatccttgcagataactttgaagcactcaagatttaaatggaggaagtaactgcagatgtggtggaaataacaagagaactaaaattagaggtagagtgtgaagatctgactgaattgcttcaatctcaagataaaacctgaatggataagaaattgcttcttatggatgagcaaagaaaatgacctcttgagatagaagctactcctggtgaagattctgtgaacattgctgaaatggtaacaaaggatttctaatgttacatcaacctagttgataaagcagtagcaggggttaaaatgattgattccaaatttcagtgaaattttattgtgggtaaaatgctaccaaacagcattacatactacagaaaaatcttttgtgaaaagaagtgttaatcaatgcagcaaacttgtttgttgtcttattttaagaaattaccttagctaccttaaccttcagcaagtcccaccctggtcagcagccatcaacattgaaacaagaccttgcaccagcaaaaagattacaactctttgaaagctcagattatcctaggcattatttaacaataaagtatttgaaattaagataggtactttttaaaaacataatgcaattggaaacctaatagactacagtacagtgtgaacatgacttttatatgcacggggaaaccataaactttgtgtgacttgctttaatgaaatattcactttattgcagtcgtctggaactgaatcctcaaaatcactgagataggcctgtatgttaaacagatatctgcacttctatgtacattgtagaattattcacaatatccaagtcatataatcaacctaagtttctatcaacagatttatgaacattaaaaatgtggtgtatacgcataatagaatacgattcagcttttaaaaggaaggaaattcagtcatatgaaaccacatagatgaacttggagtacattgtgttaagtaaaataaaccaggcacagaaagacgaataccacattatgtaacttacgtgtgaaattggaaaaagttaaattcatggaagcagagagtataatagtggttaatagaggttgcaggaggtggtagggattggggagatggtcacaggacacaaaatttcagttagatggtaggagcagtccaataaatctaatgtatcgcatggtgactatgtttaaaaatacttttatgaaaattgttatgagaatacattctaagtgttctcatccaaacattaaaagtttataagatattgcatatattaattagctctactgtgtcacttaacaatgtacacatattttaaaacatcatgttgtactcaataaatatatacaattttcatttgtaaagaaatagttaatgattaaaaaacatattcactatgaaaaaaagaaggaattagctttgtttcacagtcacagttttgaaaaccaaaaattaaatattcatttttttttctcctggccatctttttttaaaaaggtgtcagagcccacccaaacatatgatactgccagttaatactacaatcatcccaccgtatcctggaggaattggttccaggatccccaatgatactaaaatccactcatactcaggtcctgcagttggctctgtggaacctgccattaggaaaatcagctttctgtgtacacaggttttgaatcctgcaaatactgtattttcaatctgcatggggttgcagatgtggaacctaccaatatggactattgactgtatttattgcaaaaaatccaaccataagtggacccatgcagttcacacctgtgttgttcaggggtcaactgtatttgtcaggatatttaataattatatagattcatataaccccaaatccttcaaacaatcttggggtcagtataattgtctatactttatagttaagggaactgttacttagatgaatttctctaaagtcacacaggtggttaaatggcagtggtaaaactatgtttgaataaatgactaaatgattcttgattacatgtacaaatgaaaggaacatcaaataaatgatttcatcaaataaaggataccaaatatattgctatcatatatagatactttactcattagcattgttggttaaaagcacttctctggctgacttaggcaaaaaaagaattcattattgaggaaagatcttagcactcagcttgggaacagagagcaacttttaaggactatactgtgttccctcaaaactcacaggttgaagacttaaccctcaatgtaaccgtatttggagacagagcctctggggaagtagttaatgattaaagaggcttctagatcaacaaggaaactggcagataatatggtctcaaatagctgatggcaattagaaaaggaatctttgtttgtatatctcacgtgagagctcttggcacaagttctgtggccttaaasctgagtcggctattttcatcttgtgtaattttgagcaatctrtttgtgctatctctatgtcaatttcctgctctataaaatgtggataatagtaatgattaccgcatmgaattgttgtgaggaccaaatgtaacagtatacttagaagttagaaggtacctggcgtattgttaatctctcaataagtgtaggtcattgttattmaaaacctatagtcaggcaacttgaagacatcattgaatttcttagttacattctcagtgtcctttagctgaatgtccatagcagctttaaaagacttccctggtaaatagcaaactgttcttcctgaagcatgagtgaaaagtggagatggggttgggcacctaatagcccctactgcagaatttgttattgagaaacatatgatctcatgcgaagagagttaagggaactgagtttagaaggagtgagcctatgaaaattctgtcaaaagtaagcacattcataaatatggagagtcatttggttttacaatcatgaaaatattatattaaagacttcaagcaaaatgtcaactaccaatttgcatatgatttcctttgaaagaattaagattattgttgcttctagaggatcaatccagaaacttagatgtcaatgttctcactctttctcaatcaatgatcaaattctgtcaactctacctttgaattatctcaaatctatgtatctcttctcatctcaataggctattatgctagctcagatgtccatcatcccttttgtgcatcccaataagagacatcctcctctccaccatgtttttccagttctaactttccagtggcttgacatctcccctgtgatgatttagaaactccttaacataacttacaaatcttttcccacctgtcacccacttatttctatagttctacagaagtgaagatggtacgtccaggaaccatacaatagtaattgtgtccttcacatgtatggagtttgtggcagtgtccaaatattatgtcatacaattctttggaagttggccaactgaattgtctatctttttttggtcctttaaaaattctttttaataatttttgtgggtgcagagtaggtgtatatattgatgcaaaaatcctcaacaaaacactagcaaaccaaattcaacaatacattagaaagattattcatcatgactgagtgggatgtatccttgggatgcaagcatagttcaaaatatgcaaaacaatcaatgcgatacactatatcaacagaatgaaagagaaaaaccgtataatcatcacaatggatggcaaaaaagcatttgataagattcaactttccttcataataaaacctctgaacaaactgggaataaaagaaacgtacctcaacagaataaaagacatatatgagagacccacagctactatcacactgaatggggaaaagctgaaagccttttttccaagatctggaacacaacaagggtgtccactttcactagggtttgctaatatttttatgaggatttttgcatcaatattcatcagagatattggactatcgttttctgtgttttgatatgtctttggttttagtaccaggataacacttgcctcatagaatgagtttggaagtattcccttctctatttttttttttacattttcccatttttctattggaattgtttatctttttttatatactttaagttctgcgatacatgtgctcaatgcgcaggtttgttacataggtataaatgagccatggtggtttgctgcacccatcaacctgccatctacattaggtatttctcctaacactgtccctcccctaggccttcacctgctgacaggccccggtgtatgaatttcccctcactgtatccatgtgttctcattattcaactcccatttatgagtgagaacatgcggtgtttggttttctgttcctgtgttagcttgctgccttctcctctatttttcagaagagtttgagtaggattgatattctttttaaaatatttggtagaattcagcagtgaagctatcaggtcctgagcttttctttactgagagattttggtatagcttcgatctcrttacttgctcttggtcggttagggttttagatttcttcctggttcaatcctagtaggttatatgtgtctaggaatttgtccatttgttttagattttccattttattggtacgtaggctgggcacggtggctcatgcctgttatcttagcactttaggaggccaaggcaggtggattgactgagctcaggaattcgagacgagcctgggcaacacagtgaaacctcgtctttactaaaatacggaaagaagaaaaaaattatccagatgtggcagcgtgtgccggtagtcccagctacatgggaggctgaggcaggagaattcctgtaccccaagaggtggaggttgcagtgatccgagatcatgtcactgcacaccaacttgggtgacagagtgagactctgtctcaaaaaaaaaatccactttattggtatataattgctcatggtagccactaatgatcctttgaatttctgcagtatcagttgtaatgtctccttttttatttctaattttatttttttggatcttctctctttttcttagtctggctcaaagtttgtcagttttatttaatttttcaaaggaccctgtttttatttcattagtctttcatactttttttccatttcaatttcatttatttctgctctgatctttattatgtcttttgctctacaaattttcggtttggtttggtcttccttttctaattctttatgatgcactgttagattgtttatttgaagtttttcttctttcttgatgtaggmacttatagctataaactttcctcttagtactacttttgctgtgtctcataggttttcatatgttgtatttcaattatcatttgtttcaagaaaaatttcaatttacttcttaattcctgcattaacccactggtccttcaggaacatattgtttaatttttatttattcatacagtatatagtttacaaaatttctcattattaatttcttttatttgtttatttatttacttttttgagatggagtcttgttgtgtcactcaggctagagtgcagcggtatgatctcgcctttactgcaacctccgcctcccagattcaagcgattctcatgcctcagcttcccaagtagctgtgattacaggtgcgtgacaccagcatggctattttttttttcgtatttttagtagagacagggtctcaccatgttggcaaggctgctctctaactcctgacctcaagtggtctgcccacctcagcctcccaaagtgctgggaatacaggtgtgaggacagtgcccaacccttattaatttctagtatgtttccattgtgatcagagaagattctcaatattatttcaatttcttgaatatcttaagacttgttctgtgacmtaacatatggtctatcattgagaatgatccatgttctgatgatacaactgtgtattctgaagctcttgggtaaaatgttctgtagatatctattagatttatttggtctatagcgcagattaagtctgatgtttcttcattgattttctgtctggaaggtctgtccaatgctgaaagtggggtcttgaaatctccagctattattctatttgggtctatctttctctttctctttaacaatatttcctttatatatctgggtgctccacttgggggtgcatatacatttaaaattgttatattctcttgctgaattgaccccattaccattatatagtaagcttatttgtgtctttttacagtttttctcatgaaatgtatttttcttttttttattattatactttaagttttagggtacatgtgcacaatgtgcaggttagttacatatgtatacatgtrccatgctgttgtgctgcacccattaactygtcatttagcattaagtatatctcctaatgctatccctccccccaaccccaccccacaacagtccccagagtgtgatgttccccttccagtgtccatgtgttcttactattcaattcccacctatgagtgagaacatgcactgtttggttttttgtccttgcgatagtttactgagaatgatgatttccaatttcatccatgtccctacaaaggacatgaactcatcattttttatggctgcatagtattccatggtgtatatgtgccacattttcttaattcagtctatcattattggacattttggttggttccaagtctttgctattgtgaatagtgccacaataaacatacgtgtgcatgtctttatagcagcatgatttacagtcctttgggtatatacccagtaatgggatggctgggtcaaatggtatttctagttctagatccctgaggaatcgccacactgacttccacaatggttgaactagtttacagtcctaccaacagtgtaaaagtgttcctatttctccacatcctctccagcacctgttgtttcctgactttttaatgattgccattctaactggtgtgagatgctatctcattgtggttttgatttgcatttctctgatggccagtgatgatgagcattttttcatgtgtcttttggctgcataaatgtcttcttttaagaagtgtctgttcatatccttcgcccactttttgatggggttgtttgtttttttcttgtaaatttgtttgagttcattgtagattctggatattagccctttgtcagatgagtaggttgtgaaaattttctcccattttgtaggttgcctgttaactctgatggtagtttcttttgctgtgcagaagctctttagtttaattagatcccatttgtcaattttggcttttgttgccattgcttttggtgttttagacatgaaatccttgcccatgcctatgtcctgaatggtaatgcttaggttttcttctagggtttttatggttttaggtctaacgtttaaatctttaattcatcttgaattaatttttgtataaggtgtaaggaagggatccagtttcagctttctacatctggctagccagtttccccagcaccatttattaaatagggaatcctttccccattgcttgtttttctcagatttgtcaaagatcagatagttgtagatatgcggagttatttctgagggctctgttctgttccattgatctatatctctgttttggtaccagtaccatgctgttttggtgactgtagccttgtagtatagtttgaagtcagctagtgtgatgcctccagctttgttcttttggcttaggattgacttggcgttgcgggctcttttttggttccatatgaactttcaagtagttttttccaattctgtgaagaaagtcattggtagcttgatggggatagcattgaatctataaattaccttgggcagtatggccattttcacaatattgattcttcctacccatgagcatggaatgttcttccatttctttgtatcctcttttattttcttgagcagtggtttgtagttctccttgaagaggtccttcacgtcccttgtaagttggatttctagttattttattctctttgaagcaattgtgtatgggagttcactcatgatttggctctcggtttgtctgttattggtgtataagaatgcttgtgatttttgtacatagattttgtatcctgagactttgcagaagttgcttatcagcttaaggagattttgggytgagacaatggggttttctagatatacaatcatgtcatctgcaaacagggacaatttgacttctttttttcctaattgaatacccttctcctgcctaattgccctggccacaacttccaacactatgttgaataggagtggtgagagagggcatccctgtcttgtgccagttttcaaagggaatgcttccagtttttgcccattcagtatgatattggctgtgggtttgtcatagataccccttattattttgagatacgtcccatcaaaacctaatttatcgagagtttttagcatgcagggttgttgaattttgtcaaaggccttttctgcatgtgttgagataatcatgtggtttttgtctttgattctgtttatatggtggattacatttattgatttgcttatattgaaccagccttgcatcccagggatgaagcccacttgatcatggtggataagctttttgatgtgctrctggatttggtttgccagtattttattgaggatttttgcatcaatgttcatcaaggatattggtctaaaattctgtttttttgttgtgtctctgccaggctttggtatcaggacgatgctggcctcataaaatgagttagggaggattccctctttttctgttgattggagtagtttcagaaggaatggaaccagttcctccttgtccctctggtagaatttggctgtgaatccatctggacctggactctttttggttggtaagctattgattattgccacaatttcagagcctgttattggtctattcagagattcaacttcttcctggtttagtcttgggagggtgtatgtgtcaaggaatttatccatttcttctagattttctagtttatttgtgtagaggtgtttgtagtattctctgatggtagtttgtatttctgtgggatcggtggtgatatcccctttatcattttttattgcatctatttgattcttctctcttttcttctttattagtcttgctagtggtctatcaattctgttgatcctttcaaaaaaccagctcctggattcattaattttttgaagagttttttgtgtctctatttccttcagttctgctctgattttagttatttcttgccttctgctagcttttgaatgtgtttgatcttgcttttctagttcttttaattgtgatgttagggtatcaattttggatctttcctgctttctcttgtgggcatttagtgctataaatttctctctacacactgctttgaatgtgtcccagagattctggtatgttgtgtctttgttctcgttggtttcaaagaaaatctttatttctgccttcattttgttatgtacccagtagtcattcaggaacaggttgttcagtttccatgttgttgagcggttttgaatgagtttcttaatcctgagttctagtttgactgcactgtggtctgagagacagtttgttataatttctgttcttttacatttgctgaggagagctttrcttccaagtatgtggtcagttttggaataggtgtagtgtggtgctgaaaaaaatgtatagtctgttgatttggggtggagagttctctggatgtctattaggtccacttggtgcagagctgagttcaattcctgggtatcgttgttaactttctgtctcactgatctgtctaatgttgacagtggrgtgttaaagtctcccattattattgtgtgggagtctaagtctctttgtaggtcactcaggacttgctttatgaatctgggtgctcctgcattgggtgcatatatatttaggatagttagttcttcttgttgaattgatccctttaccattatgtaatggccttctttgtctcttttgatctttgttggtttaaagtctgttttatcagagactaggattgcaaaccctgcctttttttgttttccgtttacttggtagattttcctccatccttttattttgagcctatgtgtgtctctgcacgtgakatgggtttcctgaatacagcacactgatgggtcttgactctttatccaatttgccagtctgtgtcttttaattggagcatttagtccatttacatttaaagttaatattgttatgtgtgaatttgattctgtcattatgatgttagctggttattttactcgttagttgatgcagtttcttcctagcctcaatggtctttacaattttgtatgattctgcagtgactggtactggttgttgctttccatgtttagtgcttccttcagaagcttttttagggcaggcctggtggtracaaaatctctcagcatttgcttgtctgtaaartattttatttctccttcacttatgaagcttagttcggctggatatgaaattctgggttgaaaattcttttctttaacaatgttgaatattgacccccactgtcttctggcttgtagagtttctgccgagagatccgctgttagtctgatggacttccttttgtgggtaacccgacctttctctctggctgcccttaacattttttccttcatttcaactttggtgaatctgacaattatgtgtcttggagttgctcttctcgaggagtatctttgtggtgttctctgtatttcctgaatctgaacgttggcctgccttgctagattggggaagttctcctggataatatcctgcagagtgttttccaacttggttctattcttcccgtcactttcaggtacaccagtcagatatagatttggtgttttcacatagttccatacttcttggaggctttgttcatttctttttattcttttttctctaaacttcccttctcacttcatttcattcatttcatcttccatcactgataccctttcttccagttgatcacatcagctcctgartcttctgcattcttcatgtagttctcaagccttggctttyagctccatcagctcctttaagcacttctctgtattggttattctagttatacattcgtctaaatttttttcaaagtttttaacttctttgcctttggtttgaatttcctcctgtatctcggagtagtttgatcatctgaagccttcttctctcaacttgtcaaagtcattctccatccagctttgttctgttgctgtgaggaactgtgttcctttggaggaggagaggtgctccgctttttcgagtttccagtttttctgctcttttttcctcatctttgtggttttatctacttttggtctttgatgatggtgatgtacagatgggtttttggtgtggatgtcctttctgtttgttagttttccttctaacagacaggaccctcagctgcaggtctgttggagtttgctagaggtccactccagaccctgtttgcctgggtatcagcagcggtggctgcagaacagtggattttygtgaaccgtgaatgctgctgtctgatcgttcctctggaagttttgtctcagaggagtacccagccgtgtgagatgtcagtctgcccctactggggggtgccttccagttaggctgctcgggggtcaggggtcagggacccacttgaggaggcagtctgcctattctcagatctccagctgcatgctgggagaaccactgctctcttcaaatctgtcagacagggacatttaagtctgcagaggttactgctgtctttttgtttgtctgtgccctgcccccagaggtggagcctacagaggcaggcaagcctccttgagctgtggtgggctccacccagttygagattcacagctgctttgtttacctaagcgagcctgggcaatggtgggtgcccctcccccagccttgctgccgccttgcagtttgatctcagactgctgtgctagcaatcagtgagtctccatgggygtaggaccctctgagccacgtgcgggatataatctcctggtgcaccgttttttaagcctgtyggaaaagtgccgtattagggtgggagtcacccaattttccaggtgccatctgtcacccctttctttgactgggaaagggaactccctgaccccttgctcttcctgagtgaggcaatgcctcrccctgcttcggctcgtgcatggtgcgctgcawccactgtcctgcacccactgtctggcactccccagtgagatgaacactgtacctcagatggaaatgcagaaatcacctgtcttctgcatcgctcacactggaagctgtagaccagagctgttcctatttggccatcttggctgccagacctgtgaaatcaatttttcttacaaaagtatagtgactcctactcttcttagtttctattgtcacaaaataactttctccttccctttattttcagtctatgtggatctgtataggtgaagtgtgtttcttataggcaatagagcaatgggtcttgtttttaaatccattcagccactctatgtcttttgattggagagtttagtccatttaccttcaatgttattattaataagtaaggacttagtcctgccattttggtatttgtttgctggttgtgaactcctctaccttgtttttctccttccggccttcctttagcgaaagtgattttctctggtgataaaattttgtttctttcttttaattttttgtgtgtccattgtatgtttttgggtttgaggttaccatgacgtttgcaaataccatcttataacccattatttaaatctgataacaaaactatttgcataaacaaacaagcacaaagtatactgataaaaacccaatgctttaattttgtcttcccactttttaactttttgttatttctatttatatcttactgtactgtttcttgaaaagttgttgtagttattatttttgattggttcatcatttggtgttactacttagggtaaaagtagtttatacaccagagctacagtgttataatattctgtctttttctgcgtactgattattatcagtgtgtttttaaacatctgatgattatttattgctcactaatgttcttttcttactgaatgttctgttctttctaatgttcttctctttatatacaatttcttgtgagacaggtctaatattaatgaaatccctcagctcttgtcagggaaagtattcttccttcatgtttgaagaatatttttgccagatataatattctactgtaaaaggtttttctccttcagtactttaaatatgtcatgccactgtctgckaggttttcactgaaaraatctgctgtcagatgtattggatcttcattgtatgttatttatttcttttctcttgctgcttttacatttctttctccttgacctttggtagtttgattttaaatgccttgagatactctttgggttaaatctgcttggtgttctacaactttcctrtactcagatactgacatcattctctggtatggggaagttctctctyactattcctttaaataaattttctacccctgtctctttccctaccttctctttaaggccaacaattcttagatttgccctttcaaggctattttctatattcggtagatgygctttgttgtttttattatttttcttttgtatcttttgacagtgtctttttaaatagcctgtcttcaggctgactaattcttttttctgcttggtcaattctgctattaaaggactctgatgcattcttcattatgacaattgcatttttcagctgcagaatttctgattctttttaactatttcaatctctttgttaaatttatctgatataattctgaattccttctctgtgttatctctgtgttatcaaagtttctttaagtttcctcattgcagctattttgaactctctttctgaaaggtcacatatccccatttcttcaggattggtccctggtgacttatttagttcattcgctgaggtcatgtttttctcaatggtgttgatgctagtagatgttcttcggtgtctgagcactgaagagttaggtgtttgttgtagtcttcactgtctgggcttatttgtagccatcctttttgggaacgctctgcagatatttgaaaggacataggtatcgtgatttaaactctctactttagggagcatcccaagcccagtaatactgtggtttttgaagactcataaaagtactgcctcaatggccttggacatgattcaggagaattctctggattgccaggcagagactgctctgttttcttcccytaatttcttgaaaaaaaaaaaaawatttctctctcttgtctgtgccacctaaaactgggggtggagtgacataagcacttctgtggccaccaccattatgactgcactacatcaggcctgaggcccacagagcactgcatcttgcccaatgcctgctgtaatcacttcttggctactgcctatgtttgctcaaggccckggagatctgcaatcagcaggcagcaaagccggccaggcctgtgtccttcccatcagggcagtgagatcccccaggccckgggtggatacagaggtgctgtccagaagtcagggactagagtcaaaaacattagacgagtacctggtgttctattatattgcagtcgagctgacgttcaaaccacaagatgaagtccttcccacttttctcttctctttccaaaggcagaggagccacaccccatagtgacccctacccactggttgctagactaccaaccagtgttctcttaaagccaaagggctcttaaatcagcttgtagtaaaggctgccttgcctgggactcacccttcagggcagtgggctcccttgtggcccatggtaggtccagaaatgctgttcaagagctaagtcctgcaattgggtatgccaagagcccacttgctgctctaccatgctgtggctgtgctggcacctaaggtgcaaaacaaagtctctttactctccttccatttttctgaagaagaaagmatcttgcctcatagctgcctcagctgaaatgtgctgagtctcacctgaaacctgctagtctcagatgctcatccaaagccctcagtgtattaatagtacctgggtattgcttaggttattcagggctcaaggtatcttcaattaacaggtggtgaatgctctgaggaatgaattctttccttcaatgcagaggtttcccttctggcccagcctatgtctagaaatgttgtctaggagcagtggccyggaacgggggcctcacaactctgtttggtgccttatcctcttgtggctcagctgatatgcaaagacaaagtcttccttactgtttctttccattcctccagcagaaggaaggagtctctttgggagctgcgagatatgcaacctggagttgggggaggggtgataacagcactcctttggctgacccagctggtgtctcagtatgtcaaatatccccctagtccacaatttctgggacttattcagcactggactcacctaagagttgcagtccttatggcttagactgcctttcaagtttacttggaaacacagagaactgtaggccccctgtggtgaggttttcaggcactgaagttcttactgctgggattgctgattcctctcaggttaggactggcttaaatgctccctctgcctccaggggcaggtgtcagctgagtttgatctagttttcctttgtgtctaacataacarcaatgagttcagtgcctcataattgctgtgttcttccttcccccccgtgcccagagatagactgtgcaccacatgactgctactgaggttgrgagggaggggggttggtgattcaggactgtttttttccatctcttcagtgcctcttttagggatatgaagtccaaaccgggtactatgagtgctcacttgatttttggttctcatgaaggtattttttctgtgtagttgttaacttggggccttgtggggtatggggaaatgattagtggagccttctattctgccatttgctttgcttctcctccccattataaactatttaaaaaatatttaatagcttaagaaattacttaagtaatactcagtatagaaataaaatatgtgktctctcarctatccacagtgtgctgtcaattatggaataaaaaatacgtattgagtagtttaaatggaccatttttttaaaaggatgattagtttactgtaaactctataaactttsatatagatttaacaaattaatcatttacaattataaatatgtaaaaattctttgdttatgtgaacaacttttggttcaaaaagtagagtaactaaaagtataaaattcaatgccttacacagcaagcatgtgcagatagtagaaaawcctaattgataatttttaatatgtcgtctggagtagatgatttaggtttgtaagaagttataaactgcctaagggtagggaatcactgtctatggaatcatggtgtcattaaaagaattcgatattcggcctcatattccagacattgccaatggttagttttgtgacttgagggaagacatttacttttttgtcagcaacagcttccttatttgtgtaaaaataactcttgtttttctcatgtcataaatgattacaatttgaagttgctttcacttccagaaagtgggtaaagacttttttttctttttaattagagagagtatctcaccctgttgcccaggctgaagtgcagtggtgaaatacctcactgcgatctcaaatttctgggctcaagcaatcttttcatctcagtctcctgagtagttggtactatagacacatgcccctatatgtggctaattaaaaaccaaaaatttaaagatgagttttattaggttgcccaggctcatatcaaatttctgccctcaagcaatccttctgcctcagactcccaagtagctggtattaccggtgtaagccactgcacccaggataaaaattttataacatattttcccattttttaatctcaatgttttcaaaatataatatagatcagactcttttagatagctttttataagatacagattgccaggcactttgggagcctctgatttacctgatctggaaaagttcttgtattgttaacaagcaagcccaattgatcttgaagtagatggtgtgaggaacacacattgaaaacaatgtttgtctctattcctctacaaagctaattccagtccccctgaaacttttctccactaattgctttttcttcttatacttacaatacccttccctcttgctccactttagacaaccagaggacaaggtatatgaaacccagttctcattattacagtaactttcttgaggcattcttgtctttttccaacccacaaatggttgaaagtattaggccaggtattttgccttgaaaccaaactttccaactctttgtttgctctgctaacttgttttaaataaggctgcagctgtgctatttttgccaactctagaaaattgacttaatattgttctagaatactctttcagctataacaagttatgtataaatcaaaagcttcttgtgtaaaacttcttataattgtagaggctgctcaatacagaacatggtctcagtcctcctctggtccacaaagcctctgacttcctgtctacggacagaacatctggtttaatctacaggaacccataacttcctgaagctttatgctaaacagtgacagcgtgagtcaattgaattttagtgtgtctgagtccatagagtgttagctacagaaacctttccattgccattctgagcaagtgcagcaggcagtgtgcctacagctctgcaaagaaacttcaggtaagcagaattgtttagaacagcctttttttcttggcatttcaattaattaggattcttgttctcaatcatttgtatttgttaatttatttcttttcccctgaaaacccttggaatgagcactcaccagggtctcaatgttgagaacaaattcttcaaaaccttttaggtacctgaagctggaaaatactttagaaaaagccagtgtgtagccttttgaatttgtaaaatgtccaaatgctttccttgaattataaattatcaatatgcttaaacatttctctaacaacctctagatctccagggtaatatagttaccaaaaagaaaaaaaatcagtattctccttgcctccaatcctgcttctagagtattacttatttgcatagaaaaatcttccttcttccttctgtgtcatgtggctggaataaaacaatgcttttctgttgccctctgccaaatttctctgcattcgttgaaatatttggcacctgacatcctaatttttctcttcagccaacttctgctacatcctgttcatgtctgtgatacctgaagctcccattcccttcttggctcctactctattgacttggagttgatgccaacagtcatacatgccaaactgatctacttctgaatacctctgaaatctcaacctctaatagcctaatatctgactccagtctcctatttgtaagtacattttcccctgtctattaacattgctattctttgacttcatcaagtactttcgtcccttgctttttctatattttctcactttattggtctccaacctactttacttttttcttctctatcttagatgtgagtttcaatccctcattactatgttctcaaatgctttgtcccttatcttttttgttatccagccctgaaaaagccaatcttggtttgttttaatttgtcttctgtgcttctacttttagggtgctgagcttaatawactgttgagtaacacttccartgatggtgtccctctttacatgatcctaagcatgcttgccagtccttgctaattctagtccactstttctcccattaacatcaaaagccatttataccctaaccatttcccstaacatcctacttctttttctgaacactttcttggcatactccctcacccactcacttctaaaaagtgattttgggaataggaagaaattttacctcttccaggaaatagacattcaaaaataacttgccaactctatgctccttttttctaaccctgtgtactcctgtatacaattagtccttacttaacattgtcaataggttcttggaaactgcaacatcaaatgaaacaacacatatcaaaattatttttaccataagctaattaatataaagaagagttaagttcctacagcatatttctggtgacaaaaacatcaccaaacttataaagaactgaagcacttctaatrtaaaacaatgcaataaatgtaagctgtatatacatttaagaaatattgatacaaacaagtragataattatttacctgatttttgttgcrttgatgtgtgatggtgatcacagtggtggtgagttaaattgagaaataaatgtttgcaaagcaaaaggtgtaagaagcaactcttgtatctatgaatttaaaaatccatcacaaatatgatgggctcgctgagtccttttgcacagcattgtttattgtcatgcatttgtatcattatcatagactttatgaatttttgttttattatgaatgtttcattcattcatttttcaactgccttattgcagttcagcggagcaagtggctgaagcctatcctggtagctcagagcacaaggcaggaacccaccctggactggaaacccttccatcctggggacacacgtgcacacacacacatacacactctctctctcwcacacacacaaacacactcatcctgtgaaaatttagacatgtcaatatactaatgtacacatttttgagatgtgagaggaaatgggattatccagagaaagtccacacagacatgaggaggacaggcaaactgcacatagacagtggtccagccaggaactgttttttttctcttcaccattataatgaaaagatattgaacaaaatgacattatttgatgacctgctgtatacctacatacatacatttgcatctgcatccatcctaaatttttttgacttctcactggaagaagtattcttcctgttcaaaacttaatttaacaagtatgctgataattatggttgatgattacatgaattagtcaacataaataagctgaaatagtggctggcattttgtacataaggtcattgaatttctgtcacctttctatgtcctgttagacacattggcctatcaatgacttacatcttacctcttgtagttagtataggtatgcttaactctcatctaataagagaaatgcctttctttgagctcttgtacctctcttcttccccttgatactctcgtgttcttctttcttttctggtcaagctctttcaaaaagttaccttcacttcctcacatttcatttagtctccaatccccataatctgatttcttctcctgtccatgtctcttacaaagtcggtaatcaactcctaacttcaaaatgcactgccgcctttagtactcatctcttttagcttctcagcaamctttgactgctttggtcactctttccttgaaggtttctcttattttgacttccaaggtcattctcttatttttcacattcttttttttttttttttgccatgtttccgatctcttctactggctccttttcctctcgattttgttaaaaaacacctgatccaatagtcactctcttataatcctccattataatatattgaagaatatattatattatattagactattgcatcatgttgacccataaaccttctactgccttggcaccttggagtgaattgaaactaggtgtctctcattggtgagagcagaaccagagtccagccatggagggaagctaacggtgaaatggaagcgggtgggagagcatatgctattggtagaggcaacaggccatttacaacctttttttaatccacatttttgtgcaccccctataggttacatatccaatattcattgcaaaaaaacctactataaagcattttcttctgctttgaaagtttctgttagcagccacgtgttttctcagaaacttggctatgccaggarcaaagagacttaatgctcagtctttgaggaaaagcattctaaaaaccacatttctaaccttcactgactctatttgttcattcactgaacaaaagcttattaatttttccactatgctaagtgctgagcttgatgcttgagtcacaataaagagcaagacataatatcacttaccaaggagattactctcctctggggaaatatgctaccaaagtctgcagaatgcgcagatttctgtgccattttgttactgcacccatgatcttagacagtgacagaaacagatgagcttgttctagatctgtggtttgcctcaaaatgtctattttgtgccaataggtttattcaagcaasttacatatagtccatctttgaagctgcagttttcttcatttatgtttctgtccagtggaatggtcaccttcactggatttaaaggtttttaaaatttccttcagaaccttgtatatacacaaattaccaccatgctaaacacttcacacaccttttctggcaaggaaatcctcatgacaacctacaatgtagatattactatccccattttatagataatgcaactgaggcagagaggctcaaataatttgacctacctaaggtgacccagatagccagaagaggagccagrggtggaattttggtttgtttgattccaaagcccatgttgttaaccactttgcttccatttgtattgattttggctatatacttatgaaggaggccagcccctccacacctgtgggtatttctcatcaggtaggataagagactgagaaaagaaataagacacagagacaaagtacagagaaagaaaagtgggcccggggggccggygctcagcatactgaggacccgaaccagcaccggtctctgagttccctcagtatttattgattactattttcactatctcagcaaggggaatgtggcaggagaacagggtgatagtggggagaaggtcagcaagaaaacatgttagcaaagaaatctgtgtcacaaataagttcaagggaaggtactatgcctggatgtgcacgtgggccacatgtatgcttctctccacccagacatctcagtggagtaaagagtaatagagcagcattgctgccagcatgtctcacctcccgacacaggggagtttttctcctatctcagaatagaacaaatgtacaatcgggttttataccgagacattcagttcccaggggcaggcaggggacagaggccttcctcttatctcaactgcaagaggccttcctctatgaatccttcttctgcacagacycttcacgtatgtcgggctgggggatggtccrgtctttcccattccacgaggccatatctcaggctatcacgtggggagaaccttggacaatacccggctttcctgggcagaggtccctgcggctttcagcagtgcattgtgcccctgcttcctagagaatggagaatggtgatgacttttacccagcatactgcctgtaaacatattgttaacaaggcacatcttgtacagccctggatcccttaaaccttgattccatacaayacatgtttctgtgagctcaaggttggggctaaagttacagactaacagcatctcaaggcaaaacaattgttcacggtacaggtcaaaatggagtttcttatgtcttccttttctacawagatacagtaacagtctgatatctctttcttttccctacatatcccccttttctttttgacaaaactgccatcgtcattatggcccgttctcgctggttgctgcctctttggagctgttggatacacctgtagactaacaagagacagaacagacatacaaggattaatatgaaatttacaatagtggaacttctgatggttttaacctaagtgacggggttaagctttgtgaggccatcagcagcttttacaattgcctcagtttttggcaccaaatttaaatgggcttttgttgtcttaaaaatttgtttttgaaattttgaaatatttaaagtaagattatcttctcttccttgtagatggcatctaactatgtctcagtgatgctcagactcattataggcttggggtataatgcaaaaatctgatgtattttagtcacactgtaactgaaaaagatattccaagctcatgagcctatcttcctttcaaatgacggtttgtctaagatcattaatttggtttgccaattttttatctatttgggtctgagaatttcacaattttgaggaattcttttgccaattatttacgtattctgcagtttgaacagaggagtgtaaagaaattccagcagctgcagcagtagctgtgactgcaatgggacccacaatcactgcaatcaaagtaaaaatgaatcctttggatctagttagaaatcgttttamtacttctgctaaaagatggacagatggggaagcctcctgcagtcagtccawggacacagggatctacacgccctctcttgccctcaccagcagaatactgtgctgccaatcaaaagtcgaatcaatgcaagtaagcaatctacagtttttacaggttacaatttgggaatctggtttaataagtatgtttcctacaactagcatataaaggagttttacacaactttgcaaaggaattgtcagattggaatttaggttaatagtataatatggcctacgattttttgttcctatagtttgatttgcagaccaaattctaatgtggtgcgaggccacagtaagctttcatcattctggatgttcaggaccagtaacaggactaattaactttggtcgaggtgaggaaattctctttttactccattttaatggatagggtgattttcaccttttataaacctggtccagctttttaaattactatcataggccagattaatgggccagatggatggggcttgtgaacatgagtgagtctggcccatacaattataatataattggcctcgagggtcccagtctgtaatagttmcaaattcattgttttgtaatatcaccgcagtatcagccacatattctttccaaactaagacttttaggtcttttgattctttgggaatttttggggggcaagccttccccttaggcctaaattttaatgatctttgataagaagaatactgtaaattatttatttgttgcccgagtgacattcgacttaccatgtgataagtatatctactggtggcactgacagtaggtacttctaccaaccaattttgggttgtaggcattaagcatctgggtgccttccctaggcaagtaggaggataatgatatccaatggaaatatttatcatcattccttctttttgtaggtttggcagggcaacgatcatctgtggggcctggtacccatgcactattattaacatatactttagtaggactatctattcatgtgactgcccgaattaagggcaggaaaggcacatggtcccagtaagtataataagttgcagctgctcctgaagacatggggagactgaccaccattgatacagtcatcaaagctgcaagcagtatattctctggagttcacattacccttgttttcttcaggctttttcagtatactgtgtcagctttttgaactgggcccaggtcagtggctccacttccttgctggatggcaacttcttctgtaagttgtaggtatctaaactagaagctgtttttttcctagggaaatacaagcaatacctctcccccatgttatcacctttcctgttgttcatgttttatttttattattttttcaccaaatcagttttcctttatgtgaactgtcctttttatcagtaaaatgttgttctgtagaagtacttgtcggatttttctaaatgtttaaaaaaattaaagtatagagtgctagattaagttgcatctggggagtgttatactcttactgtctttttctttttttttgtttcaccaagtgttatacycttactgtctttttcctttttttgtttcaccaattgagctttgagtgttctattagttctttcaactagkgtctgtccttgggaattataagggattcctgtwgtatgtgtaatttttcamtgatttaagaatttttgaaatgttttactacagtatcctggcccattatctgttttaatttttcctggaactcccatgacagcaaaacaagataataaacgtcttttaacatgggaagtactttttcctgtctggcaggttgcccatacaaaatgtgaataagtatcaactgtcacatggacaaatgacaattttccaaacgacagtacatgtgtgacatccatttgccataatgcattaggacatagaactctgggattaactcctacctcctgagtgtgcaggtttaggacttgacatgggtccagtgttgtacaatatttyttggctgtttttatggatatcaattttactttttaatcctgttgcatttacatgagtcaaggcatgaagttcttatgcttctatgaatgcagatgatactagctagtcagcttgttcatttgcttcagttaaaggccctggtaaattaatatgtgctcaaatatgagtaatataaaatgggaaatttcttttttttacagtgtttttgtaacaaattaaacagctggtttaactgatcatcaatactatatttgattagggctgtctcaccatcctttgtagcctgtactacatatgcagaatctgatacaatgttaataggctgattaaaaccttgtaacactgaaatgacagcaaccaactctgctctttgagctgagtaatattgagtttcaatgactcgttcttttggcctgatgtaagctgcttttccatggctggaaccatcagtaaacaccrtcagagcattctgtaaatgtttatgtctggtaattttaggtaaaatccaagtagccaattttaaaaactggaagatttttgtttttgggtaatgattgtcaataatttccacaaaattagcaagaccaatctaccatgaagcagaattgataaaggcttttctaacctgtttcttgattaaagaaagaatgattttttctgggtcacttccacacaattttagtattcgtaatctcgcctgaccaattaatgtagctatttgatcccagtacaatgtaaaagtattaattgtactgtgaggaaggaaggaccactccacaagacctgcgttttgaaygataayggctgttggagaatgcrcagtagcaaaaatcaagctggagttgggccaagggatgtattctatttacttgtgctcactgaattttttcttcaactaatccaatttctttagttgtctctggagttaatgttcttttactattcaattctggatcccctctcaagacagagaacaaatttgacatggcataagtagggatgcctagagttggccaaatccaattaatatctcctagcaatttttgaaagtcatttaatgtttttaatgtgtcttttcttatttctattttttgtggtttaattttcctatcctctacctgcactctgaaataatgaaaaggagtagaggtctcaatcttatcagatgctattgtcagccctgtgttttaaacctctgtttgcagaaatgtgtaacagccaattaatttgtctctggtttttgcagcacacaaaatatcatcaacataatgaatgatataatagtctgaaaatttgtctctaactggttgaagagcttgagctacaaaagtctgacaaatagttggactattaagccttccctgaggcaacactttccactgaaacctggtggctggttctttattatttatggctggtatagtaaaagcaaatttttcaaaatcctgttttgccagaggagcggtaaaaaagcaatccttcagatgaattataattaaaggcaaatctttggggattatggccagagagggcaacccagttgagagagccccccaggggttgaattactgcattgacagctcttaagttggtcagcatgccccatcggctggaatttttatgaattacaaacactggagaatctaaggaaagaacattggtgaaacatgtcctttttacaatagtttttaaactactttatgtagcgcccccaactattccttagggagcagccactgtttgacccagacgggatgctgcagggtgagtctgaattgctccttcaccatagtgaactgcaggttgggcaataatgggtgccacaaatgagtcacagtgagcctagtttcaggctccctcctccagcactcactcggctgaggaggaggtggccatcctggttttagccccaaatggccctgatggttctggaccttttttttctaattttaatctttcaggatatattaccacctgtaattgattgtagccaatattttgtgttgaccaagccattaaagatctgctacacatttacaatgtgaacttttcacacatttcacaattacaatgtgaaatggcatgaatttttaaaaaatgaatgaatataagggaagccagttcctaatgattcgggtgttaacatggatttttgtggatgcttattggtcccttttgcaacataactctcaatgagtagcccaatgaaccaccttggaagcactggccccatcctaagtcctcctaggcttcttgtccttatttcccatgcctcatataagactttacattggagaaaaacttcatcccctactgttttgttctgttgcattataggcatacagcaccattttcaacataaaacataaaaacccattcaaaatggaggtgatggtagatgcctggacagattaccagatcatcattactcagcctcagaaccaggtaggagcaatagttactgaataccagggcagtcactctccagacattctctgtgtggcaatgagggaactgaaactgaggagtggtgagaagaatgttgacactgttgacgtatgcaggttttggaagggctgtttgggagagagggtagggcagtgagataaggcttgaacttagatccagtgatcaataaccctggatgtgtaaataaaattaggattccaagcactcagtctattccatcaaaattctgatcataggactacatcccaacctagacttctatggctgaaagtgattaagaagtgttttcacctgcgaggactctcaagtggaagtgtcatcagcagagggtaggcagacatgtagagccagaccaagctgtctattctaggtactatctggctctggaatgwtagttctttccaaaagtttatctattcacatgtactccaagagccaatcactgagccagcctcagagtccttcctgggttaggattagctcaggtgtcaccttgccaaaaacccggagccttgccaaacctgtttcttatattttttccataccttaggcaccttctcttttaaatccttaacatacaccattttggttacacttcccattcgagacaatggagctatttactcaccctctcaagggcagctcactttagtgccctaaaagaaagacactatcttcagtgtataaatagtgagttattcttggagcgactgcaaggccattttctacacctawcttagaaaaacagaatgtttcaaacaagtkaatctctagtattctaggcctatgcaagagtattttgtaattgtagggctatgtatgatatttgttgtatctggagataaaaaatgactgggatcattacaccaactcttaccacatcttcaccaaagctcctgacaacttagaggaggtcacgctccgaggttatcaactgggagcaaactttccagatccaatctaactagwctgagttaaaagaaaagatgcgtggtttattcctagctgatatggaaggtataaagcagtacctgtctttctcctctctccaggttgacaggagggcttggatgaagcaataagaaaggttgcaacttcaaaatcagtgcaggtagattacatgaaaaccatgctctttataccggaattaccaaagaaacacaagactgcaagtaatgacaatatggggttatttaaaatgggtgatgataagaagtgagattttacgttttacttcccaaattccttgatagaattattgagttgccacaaaggctgtacttggaagtgtagaatttgagactaaattatgatgggctacaaaattgcatgggtaaagaaagggcgtcacgttaggaactgtgtgctgagcatgaacagagccttcattagacaaggtctttatgcatattatttcacttagagctcacaagagtccttcggagagggcaatggacatcatggtggcatcaaaaaatgtttactgaaactatttatatcttacaaaatgctacatgcttatagaaagtatataagcatacaaartgaaaaataaaatctgtcctcttgggttcccctgctaggtgtaaataattttgacactgatatgtatgcttttagtactccatatgagttatgtatttatttttgcaatatgtacacataatttacggcactttctgaaatgaatatcatcataaatagattattgaacagttgtataaatatttctgaaagatgaattaccagaattaaaactgttgagtcaaagactatgcataataaatgaatgatatttctaaactggatggtaagattttcataaatttaatgtgtgatatcataacttatgaaacaacctaaacatccagtaatggggaaatagaaaaaatcattatggtacattaaaacattagaatactatgaagccattacaaagaatgaagcagctctacatgacagattagaaaatatttccaaaatagtttgctatgtaaaaaaacatgaggtggatagaacaatgtatatagtatgctaccatttgtgaaaataaacaaatgtatgtacatatctaaaattgcatagatttatgggaaacttgtacaaaatrtattggtattagtggttgcttctagagaaagtaattgggtaataggagatcagagaaagaagagagatttgctttcctctagtaatccatttatgcttaataattttgttactaattgaaaaaataaatagaatttaaacacacattcacagatatgtttgatttagccagaaaagttaacagtcttcaaatactgctttgccccaccagtgttcccatgagattgttaaggggaacatatacacagggaacaatgataaatggggattaaattatatttagtagtataactctggaagtctggcatgaagtacctgccctaaggtgattcctctaagcctacgcatggatatctttatatcttgccattctaggtttggctatccacaggagaggggtgcaggaaagcgtacttgagatctttcaggaagcaagcccaggatcaggttaggcatggaagtgagcaaaaacaaagcatcacccatagaaaacttagcgttctgttacccacccactggcaaacatgaagtgactctgaaactgacaaacttctcaaaagtcttcctccctggagaggggcaaaaattcctggagatcttctctctttcactatttccatatttacagaggatattactataattttacaaacaagaaaactgagtcttacataacttttccaaaagaaaataatcaggattagaatcccaaaggttagtaccaaaaatttagtattctttttcctatattgcagcttcttaaactgcgtttctgggtatgtgatgacaggctttggracacatgaagatgtaagatcagcattgttctcatcttcctgtaaaatatgtttgattggaatatctgttcaacgaattactatcttgtatatttagatattttgtggagtagaactcaaaatgcacatgatttcatacacgcatctttcaagwaaattcagccacgtggagggcttctctggtctatatcctcactcttttaaagacgtgttcattttcttccttaggatacttaacgggacattttgagatgtcctataacatatcatrttatctgtctgctattaaatacaccataaaacacggtgttcccccaccaattatttggaaacattttgaagcaggaatagaaaaggtagttgtaatacagctattgcctcctctaggctgtaggatccttaaggaaaggaatggtgttattggaatttcagtgtttgataatattggctgaataaaggtaattttttttttcttcatagggaaggaaacttttcaaacatgttcttaggtgtttcacatgcaggtcttgtaaatgaacactgggcctttgggaaaaatgagaggagctttaaatatattgaacgctgcatccaggattttctaggatttggtgtgctgggtccagaggcacagcttgtctcttggcttgtgatgggacagtccagtgagttgagaatgggttatactgtccccaaacacagaaaccaaggcaacatgtcgcaaattggttatcatcttgaaagttatctttctcagaaagaaatcccattttatgctcatgcggcagataatagtgagaaaatcctacaggcactgaaaaatgttgggtttaagatttgaccttgtggctggcatcagtggaaatgcatccccaagaaatattgttgattagttccactgtccatttcaaatcttatcagtagaaaatcattaattcaaacacaaatatgatgatgtacattagcacaaaagacacctgattatccaggatctgggtattatttaagctcacccttaacatttttaccctcctcttcctctgtattcttacagaaaattagaagctcaatcctatggtctcataatttcatttatggtgacagacatctcagaattaaaatcacccaatgccaatcattagtgtcaagataaccctttatagcaacactttcttaaatgaagatgacttctttgatgaaaaaaattgctttttattctgagtaccctctgaggagctttgagatgctcagctaaattaaattttgtggctaggagtgaaaatttggttttcttacttgctttttatcacaaggggttgctaggttgagttgcaaatttaaagcttaactttaaattttcaagatgattcttatgtctatgatgtattagttttcttttgtcattataacaaattatgataaatatgattacttaaagcaacacaatgtgttatatttatggcagtcggaagttcagaataggatttatggggctaaaaccgacatgttggcagggccagctctttctggaggcaatgtgggtaaatcagctcccttgccttttccagatcatagaggctgtcctcactccttagcttgggtctctgaatcacatcatgttttatctctctgctttcatcatcatcgcatcacattcttctcttctgcactcacatttccttctgccttccaatttttttctttctttctttctttctttyttttttttttttttttttgagacagagtctcactctgtagcccagggtggactacagtgatgtgaacttggctcactacaacctctgcttcccaggtcccagttcaagcaattctcctgcctcagcctcccaagtagctgggattgcaggcatgtaccaccattcccagctaatttttgtatttttagtagagacggggtttcaccatgttagcagagttccaatggcaaatatgaatggcagagtggaagaccagagccaaaggaggccaccttttgatcatgaagtgtaattgtttttaagatcagcgattcagaattgtaatataagcgctcaaatagaaagttctaatgatagtgcatggcatgtgtcctttccatcatctagattttccgctttttttgtctggctcactcctactcactctccagtcctcaccttagtggtcacttcccctggaatgcccgtgaccctttaagatagcagtggcaaacaccaaatgctgaacttataaccagattcacatgcaacaccttgccctgtgccatgcttcaataatgatgaggaagtgagaaagagtaggagaaaggaggcacaacaaatgttatttccatagcagaggccccaaggccagtccacttgattctctagatttccttttctgcgtaacaatgatgaaaggtagcctaggaaagccatttgtctgagactttactttgataccttgctagtcactaaacaaagagactgattccattctttagtgtagccattgcctcaattcatatatatcagggttatttatttccaataaagtatccatatagattaggtatattctaatgacaattttattaaagtccttcatttatcttccakatagcagattctgtcaaccacatttcataaagagttctgattctaagaggtaagaactgagcctggctttctagttacatgtttactactaamcccgtccttccctactacacttatgcatatttaaagactakactctcccctgcctccagcctggattgtaagttccacaagagcatggctgtgtcttctaacatcaagtctctatgttagaaaagctcctggcatatcataaatgccgaataaacatttgtaagtgaagaaacctattctatggtttcttctacggatatattaagagatggcttgcacaagatagctaggtagcttcattgtctaaaatggaactagattctccgggtatcaggtccattggtggtacttacacgtggcctcaaaggaacagaactgccccacaaatctgtgggagtcatcatttacttctagaaaagagaagtaaaatggactattattctgatgcagatatttcatgaatcccatgatcacccgtgccatgtcgtctgccctttggtatttttccatgctgtaggctattcctacatcacaagaagagtccaaggttaatcatgataccggagccccatctggacccagcatacaggctgctggcaggcctcctatacagtgcttgatgtaacgccagctcctctcattcttcctgcacctccagttatcatttaccagccctgaataagagataaccaacagggcattcttaaagttgggagtttcaccatagaaaacaaaaagaaagacaacaacattcatcctcacccctgtaatttctgggtgccatcacattctagagatcccagggactcttcttgtctaatgacccaccattgcaagctgtgtattttgaccattgacaacttttattcatcccaaagcatgaattcatcctcttttcattccaaaactcacttatgtgaataacaaaaatgtacaaggaatagcaattataaatgaccagcacatgtttttgtctctcaaattcatcatctgggtggcctgactcagctcagcttccagcttgcttttattggagtcatggaacttcaggatattctccataataaagaggactgctcttgattgctctaccttcagtgactttgaaaatgcagccactcttatcccctcacctaaactttcttgaagacctgggaagaaagccaagaaagcaatmttgtcagacatggagttctctacttacactgctcccacctgattaatacatcaatgcttagtcgttatcaaacttgagtttacaccacaatctgctggagtctttgtcacaccacagattgctctacttctcccagtccccagagtttttgtaaatttacatttctattgagctctcaggtgatgctaataatattagttgatgactcaatttgagaagaacagctgcttgcccatttcttcagacttgttatcatggatttggagtatctgtttccagtttatgatctcacatatttcaaaacttcttgtgattttttagtctctttggagaacatacaatgtacatttgtgtatgaatccacgtcatcagtcatctcctgtttaggatggtgaaagttcagatcattcaattgaactttttcttcacctctcactgattgcaattatcagaaaaatgaaagttcaaaagaaaattttaccagtggcccatgatggctgcaggtgggcacacggataataaaacctaggcttataagctactgctgacctcttgcctgcgtaactggagtttgttaaatatttcagtgacaggtactggttataaaactgcttatcagatccagaaagaagacaggatgaaatcagccaccttccaccaggccttaagatgcctcacctttctccctactcactcaattgcacacttactttattttatatatagcatcaccgagaacccagcagaatcagattgcatcagttgcttctctccctgcttttctcacctcctgggccacaggtatccccctgttatatatactgtgcccccacgtaacctcctgtgtgacacatcctgggatgtactgaggctgtatctctaggattaagtccttaaacttggctcaaaataaatttagctgtgaattatctaaatgttagtgcctactgtttcaccagacacctagaatctatagtgtcctagaatctagtgtccagggcttgggcaagatgctttagtgaatataaacattaatgagacacagccttttcccaagcctacaggatatcagcctattgaaagagtgacactgtctttaaagccagaagcccacaaaatagaatgaaatagctgaaattttggcagcactctgggtaatttatgtggtgttagacttatgggtttaaaaaaatagactggtgatcaccttctggcaagccacaaacttcatgggaagatgaatttctgtttcttgggtgaaatataaacaataagtatgagagttttagcagtgaatattattttagaaaaaagagaaaatagtgtgactaattttaaagaaaacttcaagaatttgcgagtgtttttatgaaaggaagttcctgaatatggccgaaaccaaaacttccatgaatttaaaatagtagatgttttaaaagaccagatttttaaaaatgactgaaaatagccaagtaaatattcaaggaattataaaaagattatcaaagtaaactagaagaaaacaaatggaaccatctataaaaatgaaagctacctataatgaaatggaaaacaagacatagtataaaggatatataaaaaccagagttcatttttaaatggcaaaaacagaaagagaagagagagagggataaacttctggtaaggtattttaaggaaatacgagagacagagaaaaaacaaaaataaaaaaataagcgtagagtatgagagatgagaatgcaaacagagaaaagaacaaaaaaattataatagaggattatatactactcaaaggcaacatatttattgataaaagaaatggatgttatccctcaaaaataaactatcaaaattgactttcaaaaacatagaaaacctcaacaaactattataaaatatgagaaattaaatttaaaatctaccgtttaaaaattggacaaggattatggcctccagctccacccatgttgctacaaaggacaatattttattcttttctgttgttctgtagtattccacaggaatatatataccacgtttttttaatccagtctacaattgatgggcatctgggttgattccatttctttcatattgtgaacagtgcagcaatgaatatacaaatgcatgtgtcatttgcgtagaatcattcattttcttttggctatttacctactaatggcattgtttggttgaatggtaactttgttttaatttctctaagaaatttccagactactttccacagtgcaataatcctaagcaaattaatgctgtaacagaaaaccaaataccacatgttctcactcataactgacagctaagcattgatcatacatggacataaatgtgggaacaatagatrctgtggactactagagggtagagacagaggggctggttagaaaactattgggtacgatgctcactaccaggcagatgggatcggtccgtactccaaaattcagcatcatgcaatattcacatgtaaaaaatctgcatatggaccacttgtatctaaagaaaaaaattaaaattaaaaaataagaagtagccaaaatcagattatttttcatttaaattgtacacaagccaaaacaaacacataattttaatattaagctttggaaacagaagaaaagttcctaatgccaaatctgttaaaaaaataacaaaaagagacttattgaccatattctcttatgaatacatayataaaaattctgcataaaatattcagtagtatatcagaagaacatgagcacttccaagatggccaaataggaacacctccagtctgcagctctcagaaagttagatggagaagatgagtgatttctgcatttccaaatgagatacctggtttatctcatagggacaggttggacagtgggcacagcccattgagggagagccaaatcagcatggggcattgcctcacccaggaagcagaaggggttggggtatttctgtttcctagccaagggaagccatgacagactccacctgggaaaatggtacacttctgcccaaatgctgcactttttgacagtcttagcaaccagcagtccttgagattccctcccgtgcctgcctcagcaggtctcacaccaatggagcctttctcactgccagtgcagtagtctgagatcaacctgcaaggctgcagtctgacaggaggaggtgcatccgccattgctgaggcttgagtaggtaaacaaagtggccaagtagcttcaactgggcggatcccaccgcagctcaacaaggcctacgtcctctatagactccacctctgtgggcagggcgtagctgaataaaagtcagcagacaacttctgcagacttaaatgtctctgacagctttgaagagagcagtgattcttccagcatggtgtttgagctctgaaaacagacagactgcctcataaagtgggtccctgacccccatgtagcctgactgggagacacctcccagtaggggctgacagacacctcatacaggaggttgcccctctgggatgaagctttcagaggaaggatcaggcagcaatatttgctgttctacactatttgctgttctgccagctccactggtgatacccaggcaaaaagggtatagagggactaccagcaaactccaacagacatgcagctgagaggcctgacttttagaaggaaaactaacaacagaaaggaatagcatcaacatcaacaaaaaggacatccacagcaaaaccccatcgtagatcaccaacatcaaagaccaaaggtagataaaaccacaaagatggggagaaaccagaaaagaaaagctgaaaattccaaaatctggagcacctcttcacctccaaaggattgcagcttcttgccagcaatggaacaaaactggacggagaatgactttgacgagttgacagaagtaggcttcagaaggtcggtaataataaacttctccgagctaaaggagcatcttctaacccattgaaatgaagctaagaacatttaaaaaaagttagacgaatggctaactagaataaagagtgtagagaagacattaaatgacctgatggagctgaaaaccttggcacgagaatttcttgatgcattcacaagcttcaatagccaatttaatcaagtggaagaaaggatatcagtgattgaagatcaaattaatgaaataaagtgagaagacaaagtgagagaagagagtaaaaagaaacaaacaagcctccaataaatatgagactatgtgaaaagaccaaatctacgtttgattggtgtatctgaaagtgacggggggaatggagccaagttagaaaacactcttcacgatattatctaggagaacttccccaacctagaaaggcaagccaacatccaaattcaggaaatacagagaacactacaaagatactccttgagaagagcaaccttgagaagagcaacctcaagacacatgattgtcagattcaccaagattgaaatgagaaaaaatgttaagggaagccagagagaaaggttggattacccacaaagggaagcccatcagactaccagcggatctctcagcagaaaacctacaaaccagaagagagtaggggccaatattcaacattcttaaagaaaagaattttcaacttggaatttcatatccagccaaactaagcttcataagtgaaagagaaataaaatcatttacagacaagcaaatgctaagagattttgttaccacaaggcctaagagttcctgagggaagcactaaacatggaaaggaaaaactggtaccagccacagaaaaaaacgtgcccaattataaagaccattgatgctataaagaaactgcatcaagtagtgggcaaattaaccagctaacattataatggcaggatcaatttcacacataacaatattacccttaaatgtaaatgggctaaatgtcccaattaaaagacacagactggaaaattggataaagaatcaagactcatcaatctgctgtattcaggagacccatctcacatgcagagacacacatagcctcaaaataaatggatggaggaagatctaccaagcaaatggaaaacaacaaaaagcagggcttgcaatcctagtctctgataaaacagactttcaaccaacaaagatcaaaagagacaaagaaggctattacataatggtaaagggatcaactcaacaaggagagctaactctcctaaatatatatgcacccaacacaggaactcccagattgataaagcaagtccttagagtcctaaaaagagacttagactcccacacaataataatgggagactttaacaccccactgtcaacattagacagatcaatgagacagaaagttaacaaggatatccaggatttgaactcagctctgcaccaagtggacctaatagacatctacagaactctctaccccaaatcaacagaatatacattcttctcatcacatcgcactcattctaaaattgaccacataattggaaataaaacactcctcagcaaatgtaaaagaatagaaatcacaacaaactgtctctcagaccacagtgcaatcaaattagaactcaggattaagaaattcactcaaaactgcacaactacatggaaactgaaaaaccttttcctgaatgactactgggtaaataatgaaatgaaggcagaaataaagatgttctttgaaatcaatgagaacaaggaaacaatgtaccagaagctctgggacacatttaaagtagtgtgtggagggaaatttatagcaccaaatgtccacaagagaaagtaggaaagatctaaagtcaacaccctaacatcacaactaaaagaactagagaagcaagaggaaacaaattcaaaagctagcagaagggaagaaataactaagatcagcgcagaactgaaggagacagtgacccaaaaaaccgttcaaaaaaatcaatgaatctaggagctggttttttgaaatgatcaacaaaattgatagaacgccagcaagaaaagagagaagaatcaaacagatgcaataaaaaatgaaaaaggggatatcaccaccaatcctacaaatagaaactaccatcagagaatactataaacacctctatgcaaataaaatacaaaatctagaagaaatccatatattgctggaaccatacaccctcccaagactaaaccaggaagaagttgtatctctgaattgaccaataacaggttctcaaattgaggcaataattaatagcctaccaacaaaaaaagtccaggaccagagggattcacagccgaatgctacaagaagtacaaagaggatctggtactattctttctgaaactattccaatcaatagaaaaagagggaatcctccctaactcattttatgaggccagcatcatcctgacaccaaagcctggcagagacacaacaaataaagagaattttagaccaatatccctgatgaacatcgctgcaaatatcctcaataaaatactggcgaaccgaatccagcagcacactaaaaagctaatccaccacgatcaagtcggcttcatactttggatgtaaggctggttgaacatatgcaaatcaatatacataatccatcacataaacagaaccaaagacaaaaatctcatgattatctcaatagatacagaaatggccttcaacaaaattcaacagcctttcatgataaaaactctcaatatactaggtattgatcgaatgtatctctaaataataagagctatttatgacaaacccagagccaatatcatactgaacgggcaaaaattggaagcattccatttggaaaccaacacagacaagggtgctctttctcaccactcctatttaacatagtgttggaagttctggccagggcaatcaggcaagagaaagaaatgaaaggtattcgattaggaaaaaaggaagtcgaattgtccctgtttgcagatgacatgattgtatatttagaaaaccccatcgtctcagcccaaaatctccttaagcagataagcaacttcagcaaagtctcagggtacaaaatcaatgtgcaaaactcacaagtattcctctacaccaataagaggcaaacagagagccaaatcatgggtgaactcccaatcacaattgctacaaagagaataaaataccttgaaatccaacttacaagggatgtgaaggacctcttcaagaactacaaatcactgctccatgaaataaaagataacacaaacaaatggaagaacattccatgaccatggatagaaagaatcaatattgtgaaaatggccatactgcctaaggtgatttatagagtcagtgccatccacatcaaggaacaaaagactttcttcactgaattggaaaaaactactctgaagttcatatggaaccaaaaaggagcaagaatagccaagacaatcctaagcaaaaagaacaaagctggaggcatcatgctgcctaatttcaaacaatactacaaggctgcagtaatcaaagcagcgtggtaccaaaacagatatacagaccaatggaacaaaaccctagcctcaggaataacaccacacatctcaaccatctgatctttgacaaaccttacaaagacaacaaatggggaaactattccctatttcataaatggtggtgggaaaactggctagccatatgtaggaagctgaacgtggatcccttccttacaccttatacaaaaattaactcaagatggtttaaagacttaaatgtaagacctaatagcatacaaaccttagaagaaaacatagccaataccattcaggacataggcatgggcaaagacttcatgactaaaacaaaaaaacaatggcaacaaaagccaaaacagacaaatgggatctaattaaactaaagagcttctgcacagcaaaagaaactatcatcagagtgaacaagcaacctacagaatgggagaaaatttttgcaatctacccatctgataaagggctaatatccagaatctatgaggaacttaaaccaatttaaaagaaaaaaaaaccccatcaaaattgggcaaaagatttgaacagacacttctccaaagaaggtatttatgcagccaacagacacatgaaaaaatgctcattatcactggtcattagagaaatgtaaatcaaaaccacgatgcgataccatctcactccatttagaatggtgatcattaaaaagtcaggaaacaacagatgctgaagaggctgtggaaaaatataaatgcttttacactgtgggtgggagtgtaaattagttcaaccattatgaaagacagtttggtgatttctcaaagatcgagaactagaaataccatttgacccagcratgccataactgggtatatactcaaaggattataaatcatgctactataaagacacatgcacatgtatgtttattgcggcaatattcacaatggcaaagacttggaaccaactcaaatgtccatcaatgatagaccggattaagaaaatgtagcatatatacaccatggaatactatgcagccataaaaaagaatgagttcatggcctttgcagggacatggatgaagctggaaaccatcattctcagcaaacaatcacaaggacagaaaaaaaacactgcatgttctcactcctaggtgggaattgaacaatgagaacacttggacacaggatggggaacatcagggcctttcagggggtgggtgactggggggctgggggaggagtagaattaggagaaatacctaaagtaaatgacaagttgatgggtgcggcaagccaacatggcacatgtatacctatgtaacaaacctgcacgttgtgcacatgtaccgtagaacttaaagtacaattaaaaaaaaggtaaaaaaatgtgaacaggaacagtttgttttagaaaggcttgaatggctttgattggaagatcttttagtgtgataaattaaaggaggaaaaattacatgagtatataagttgccaaatagaaaagacaaaaatgaaagaatataaaatttactctccattataaatataagttctatgaaagtaggaacaagaggaaaatgctctaaacatgtaaagacagaatcaaatgcaattctacatatatgttgttatagctattttattaaaatcaggaatgagacaagtataaaaatattattattgttagttggtattgtttccttaggttgtaaattatgcaataagtcaagaaactaaaaacccttacaaatattggcaaagaagcagcaaataactttgtttgtacattacagtattatgcattgagaaaatccaagagactttgacaaaaaacaaaaccaaataataccctacacaaacaggattttaaagaatagtgtgacatatttggaaatcaaaaatacaaatgaaaarcaataacaaaataataattctcagaaatagaaaaggaaaaataatttaataatcttaacaaataatataaaataccgaaaagtaaacttaatggaaaatcatgtagtttactacaggaaaacacttaaattttacaagatggcatagaacagaaactgaaaaaagtgagaaaaagaccatatttctagatgacaagatgtagtaccgcaaaaatagtaatctttccacaatcgtcttttagacaatactaaccacaattgcaatagttagttggggtagttggtggggaactgggaaaattagttattgttcatatggctcttaagtgtataagaaataggaaagtaagaaaagtattggtgaagggtgatttgctttattagatattaaaatttaccacaaaacaatgaaatagcataagaaaagactagaaacaaatacagaaatagatacaaaaatatgtaaaggtgatatgacaacatagacatttatgtttcagtagtggaatgacttatttaataaatagtaataacataattagccagccataaggaagaaaaatataaaagaatgttatttcatgctattcaaaaacatattttaaatagaatgaagattgaaatgtcaaaagtaaaaattaactcactgtaagacaaaataagaaaacacttgcatgatcttggagtaggaaaaatcttcctaattattaactaaagaaaacaaaacctctgaagtcatagtgaaaaatataacatatttgattacaggaaagttaaaaatttcttcatgtcaaaatctccatcaataaaatagaaaataattctaaattgggcaataaatttgtagcatacgccttgtgttagtatccctagtatcaaaaacacttacagaattttaagaatgacataaaaccccagtgtaaacatggtgaaacaatacaaacmgttcagaagtaaaccccaaattactgataaacatatgaaaatacaatatgttgactatcactagtcatggaaatgcaaattaaatctacaataagatgccaactttcactcaccagtttggcataagttaaaagagggaaaacattcagtgccggtgagaatgtggggaaacaattcttccacacattgctaatggaaataaaactggaatcctttgggaaggtaatctggcagggcttacttatgataaaataaattctgacttggagacatcccttttggaaatcaattgtattgagaaaagtttccaggatgtaaagacatatataagaggacattttttgaagcattgtttgtacttgcaacaaagtgtgaaaaatttgaacccaacagcagaagaaagagtgactaaatagcattgcattggctctgtggaatgccacagttgttaaaacgaatatattagttctgtattgattttcccaaagggatgcccatatgtcaaaggcaaattaacaagtgatgacaggatatattcccagtaatggcatggctgggtcaaatggtatttctagttctagagccctgaggaatcaccacactgacttccacaatggttgaactagttcatgtcctttgttgggacatggatgaagctggaaaccatcattctcagcaaactatcacaggcacaagaaaccaaacaccgcgtgttgtcactcataggtgggaattgaacaatgagaacacatggacacaggaaggggaacatcacacactggggcctgttgtggggtgggggtgggggtagggatagcattaggagatatacctaatgttaaatragaagttaatgagtgcagcacaccagcatggcacatgtatacctatgtaactaacctgcacattgtgcacatgtaccctaaaacttaaagtataataaataaataaataaataaagtgacgacaggagagatcatcagtgtatgttaatatgcacaaggacattgattaccccmaagggtaggaaatgaggagaggaggggaggggaagtgagaggttattaacttcttaaaatcatgttaaatttttcccttgtataatcagcatatattatcattgtgattaaaaaccaacaaaaaaaatatttttttctagataaattctgtttctcaccctaaaaagttattattcaagatcaaattgactttcaacactgcacraaacatggtatactatggaatcagacaaggtgaatgtaattcaaagtaaattgcagcatatttcaatctttcctttttttttggtcatatatgtgtcctgtggaacttttatatttcaatatttttgtatattgactcactttataaaaactagccttgttcaaagcaatgcatatatgaagttatggtttgatgctatagttacgatgctaaaatacacataataaatacaaagttagtgaagtaaaaagaactatttggcttcctacaattatttagcatatcacactttgaagaacttggaccatggattaaataaactaagcattcatcttcaatccgaaattgtcaggaagccaggaaatcaaaagaacatccttagggaaggtgttaggctcagcctggctctcaccccctttacccctttgttcctcaatctagggtcactttgtcactttctgcattccaatcctgacccagtttgcacgctagtcttgaattcgggtggcttattactatttggaggctcagcgcctatactcgcatgaagttgggctggcaatgaggcttcagttcactaaccagatgtgcataaaatrcatacaaaaaggggaagtctttagggcaaaaaaatagacccaggtttgtattactatttcagcttaatagtttattccttatttcagcttaatagtttattccaattaccataatggctaattatggtaaatactatttaaaatcatgtgctatgtactaagtctttgatgtacaatatctcatttaaacstcttgtaatcctctgaagaaggtcctgttatttttcccattttaacacatgatgaaactcagagaagggcctatggttaccgtcagtcctttgaactttaattcagattgggcaatgctttaacgtctggtatccagcagctacatgacttaatatttctcagtgtcatttccttatctctaaattggagacattaatggtcacttcgttagattgttctaatgataagtcactaacaagacaattgcttccaaatagttgacacacagtaattatgattcccttctctggttcctgcaaagtaacctcctrgttcttgtttttttgtttgtttgtttaagacagagtctcactctgttgcccaggctggagtacagyggtgtgatgttggctcactgcagccttgactttctggggctcaagtcatcctcccacctcagcctcctgagcagctaggagaataaacatgcactaccatgccctgctaattttgtttattttttatttatttttgtgtgtgtgtggagatgaggtctcactatgttgcagaggtgggtctcaaattcctgggctsaagtgatcctcctgccttggcctcctgaagtgctgggattacaggaagaagacatcatgcctggccctgagaggaaatttttactggtagacttctgctttggtttttgtttctaagtcactgttctgatatctcagacacccaactttccctgtcaatttgcctcctctcagcccctgcaggtgacccctgccacctcaaaaggcccttagtctgtgagtgtcagccttatcattttcttcctctaccccctccaccccttttcctagatgagtcttatgctttacaggaagggtgggaacacatggcactcttgcaaggtgcgaagtacttaaggagtcttttaaaatactcacattttctttcactctataaaagcagccctggtgtctcaactggtcagttccttakgccctttggaccaacctggctccacccgtccctatctgtgtgcctacctgcttttgaggctggataataaccatctgatactcaggccaggagtccactagcacctccatattgaaggggttcctgtgatttatgtggtacacagagccatacacctgaaggagggatggaaagactaggagagcctgggatcctcagagatggagatctggatgtgaagagaaagagaaaaacaaaagtcaacagacagtactgtgaccaagtcagtgatggtgagatcagcagcatctctaggacccttctgattgacatgaagtcaccatcaagtaggcagaactcacaggtaggtgtccttctgataccaaagagctactgtgcactagctgggcacttggcaatgctcttagcacttacattgtatggatttatttagtgtccacaaaaactttaagaggtaggcgctaatattattcctatttccttgatgaaaagaacgaaggtaaaggcacagaaaggtaaagaaacatgcacaaagcctctgactctctcactgttccctcaccttcagggactcaggtatgctccaggccaagggtttgtatagaaccagcagcttctgggagttattcagtagaatcattttgtgggatgcttcagtccttgagccattcaagaagaaactctgaaaagataacaagggaagggrcaatgttaagggaccaaatgaatttaaaatgcactttatatttcttcattcaagtaacaatcatgatgtagaatctgttagtatcatcctcattctaaacataccaaagctcagagagaccaagtaaattcctcaagttcttacagaggtaaatgccagagtcaaattttgaaaccatatatgaatggctccaaaacacatacccttcctccctggtggaatgaattaaaagtgaatattaagagttctgtgaggttctcaaatgcctgtagcagaacattccaccaccaacatcataactttttccctgtcgtctggtcatcaaatgcctgagaagtctttttccatgtggaatagaaaatatcagccatctaagaatagttatggctgaaaaacttagagcaggatgtggcaacgattttctttagtttctgagggcaaaatattttagacctatggccattttggatcttttctcatttcattacaaattttttttaaaaatgatgaaaaaattttgacacatatctgtaaacttccattgaaataacattcacaattctcagaaatgtgccgttaatttaataataacttggagaaggtaatcatcaccactcatagtttcaaagcttaggctggtttcaaattttaattatgtctcctacttctttgttaggttgcttaatcaatcagaactcaaagtgttttctcacagctttggagccagaaattagaatgcatgttttccagaggaattagattacacaatgcaatatatataaaaatgcatagcrttatacctggcattatgtaagaacaatatttaacatgttagtttttttaattgactttatattaatcaacatgtcatatagagatttagcaattatatccaatgatataagataattaaaaatgtaaagaacttacaacaaatttaactaatgtaagaagaaacccatggatcagatatttgaaacaatcattagcaaattagttaatacagatgtttgaaattttttatccatgaaggttaaatagttaacaaatatgtgttaagcmataggcaaggtgaaagatgttttgtcttgtctggggtcaaaggcctcaaagttcaactatgttctgtagctagatgaaggaaagtttaaacaaaggcatccttttgcaagatctcagaatttcagaatgcttgaatactcaaggaaattttagtaaatagaactggatctctgacatgagcctatcccctgtttaactctgctgttcttgcagttgtcaaaaaaaactggtcttttttttccccccacctccaagatatgtcttttctgtttatcacctgycaactaaaattgyccataccctgtgttttactattgtattctcctttaaagttttagtaaagattttagaagtctcaattcaagatctaccatgctgtatcacttcctgcagaaaaaacttgtgttccatttgccctgagaactttgtagactgggctggtacatgagaacaactcccacacctatcagctgccacatctttgtccaaaatacctctcctatctattccctactccattcacttgcaatgaccttagttcagggcctccttctcctcatacttaatattgcttttataaccgcacccaggcctcagcttctaacatctacccaaataaaagttttctctacccatattcttaccatcaacatttcatttattactattatactttaagttctagggtacatgtgcacatcgtgcaggtttgttacatatgtatacatgtgccatgttggtgtgctgcacctattaacttgtcatttacattaggtatatctcctaatgctatccctctccyctacccccaccccacgacaggccccggtgagtgatgttccccttcctgtgtccaagtgttctcattgttcaatttccacctatgagtgagaacatgtggtgtttggttttttgtccttgtgatagtttgctgagaatgatggtttccagcttcatccatgtccctacaaaggacatgaacttatcattttttatggctacatagtataccatggtgtatatgtgccacattttcttaatccagtctatcattgatggacatttgggttggttccaagtctttgctattgtgaatagtgcctcaataaacatacgtgtgcatgtgtctttayagcagcatgatttataatcctttgggtatatacccagtaatgggatggctggatcaaatggtatttctagttctagatccttaaggaatcgccacactgtcttccacaatggttcaactagtttacagccccaccaacagtgtaaaagtgttcctatttctccacatcctctccagcacctgttgtttcttgaatttttaatgatcaccattctaactggtgtgagatggtatctcattgtggttttgatttgcatttctctgatggcccatgatgatgagcattttttcatgtgtctgttggctgcataaatgtcttcttttgagaaaggtctgttcacatcctttgcccacattttgatggggttgtttgtttttttcttgtaaatttgtttgagttctttgtagattctggatagtagccctttgtcagatgaataggttgcaaaaattttctcccattctctaggttgtctgttcactctgatgatagtttcttctgctgtgcagaagctctttagtttaattagatcccatttgtcagttttggcttttgttgccattgcttttggtgttttagacatgaagtccttgcctgtgcctatgtcctgaatggtattgctaggttttcttctagggtttttatggttttaggtctaacatttaagtgtttgatccatcttgaattaatttttgtataaggtgtaaggaagggatccagtttcagctttctacatatgattagccagttttcccagcatcatttattaaaaagggaatcctttccccatttcttgtttttgtcaggtttgtcaaagatccaatggttgtagaagtgtggtattatctctgagggctctgttctgttccattggtctatatctctgttttggtaccagtaccatgctgtttggttactgtagccttgtagtatagtttgaagtcaggtagcatgatggctccagctttgttcttttggcttaggattgacttggcaatgcgggcttttttttttttgttccatatgaactttaaagtagttttttccaattctgtgaagaaagtcattggtagcttgacggggatggcattgaatctataaattaccatgggcagtatgggcattttcatgatattaattcttcctatccatgagcatagaatgttcttccatttgttggtgtcctcttttattttgttgagcagtggttcatagttctccttgaagaggtccttcacatcccttgtaagttggattcctaggtattttattctctttgaagcaattgtgaatgtgatttcactcatgatttggctctccgtttgtctgttattggtgcataagaatgcttgtgatttttgcacattgattttctatcctgagactttgctgaagttgcttatcagattaaggagatttggggctgagacgatggggttttctaaatatacaatcatgtaatgtgcaaacagggacaatttgacttcctcttttcctaattgaataccctttatttccttctcctgcctgattgccctggccagaacttctaacactatgttgaataggagtggtgagagagggcatccctgtcttgtgccagttttcaaagggaatgcttccagtttttgcccattcagtatgatattggctgtgggtttgtcataaatagctcttattattttgagatacttcccatcaatacctaatttattgagagtttttagcttgaagggcrttgaattttgttgaaggacttttgtccatctattgagataatcatgtggtttttgtctttgtttctgtttatatgctggattacgtttattgatttgtgtatgttgaaccagccttgcatcccagggatgaagcccacttgattgtgatgagttagtgttttgatgtgctgctggattcagtttgccagtagtttattaaggatatttgcatcgatgttcattagggatattggtctaaaattctctttttttgttgtgcctctggaaggctttggtatcaggatgatgctgacctcataaaatgagttattttgagcctatatgtgtctatgtgagatgggtctcctgaatacaggacattgatggatcttgattctttatctaatttgccagtctgtgtcttttaattggagcatttagcccatttacatttacggctaagattgttatgtgtgaatttaatcctgtcattatgatgttagctgggtattttgctcattagttgattcgtttcttcctagcattgatggtctttacaatttgccatgtttttgcagtagctggtactggttgttcctttccatgtttagtgcttccttcaggagctgttgtagggcaggcttggtggtgacaaaatatctcagcatttgcctttctgtaaaggattttagttctctttcacttatgaagcttagtttggctggatatgaaattgtgggttgaaaattcttttctttaagattgttcaatattagcccccactctcttatggcttatagagtttctgttgagatatccactgttagtctcatatgcttccctttgtggggaacctgacctttctctctggctgccattaacattttttccttcatttcaactttggtgaatctgataattatgtgtcctggacttgctcttctcgaggagtatctttgtgacactctctgtatttcctgaatttgaatgttggcctgccttgctaggttggggaagttctcctggataatatcctgcagagtgttttccaacttggttccattctccctgtcactttcaggtacacccatcagacggagatttggtcttttcacctagtaccatatttcttggaggctttgttcattgctttttactgttttttctctaaacttctcttctcacttcatttcattcatttgatcttcaatcactgataccctttcttccagttgatcgaatcagctactgaagcttttgcattcgtcacgtagttctcttgccatgtttttctgctccatcaggtcatttaaggacttctctacattggttattctagttagccattcgtctaatcttctttcagggtttttagcttctttgccatgggttggaacttcctcctttagctcggataagtttgatcatctgaagccttcttctctcaactaggcaaagtcattctatgtccagctttcttctgttgctgttgaggagctgcattcctttggagtgggagaggcactctgatttttagaattttcagcttttctgctctgatttttccccatctttgtggttttatctacctttggtctttgataatggtgacgtacagatagggtttyggtgtggatgttctttctgtttgttagttttctttctaacagtcaagactctcagctgcaggtctgttggagtttgctggaggtccactccagaccctgtttgcctgggtatcagcagtggaggctgcagaacagcaaatattgctgaacagcaaatgtgctgcctgatcgttcctctggaagctttgtctcagaggggtacctggccatgtgaggtgtcagtctacccctactgggggattcctcccagttaggctacttgggggtcagggacccacttgaggaggtagtctgtccgttctcagatctcatactctgtgctgggagaaccaccactctcttcaaagctgtcagacagggacatttcagtctgctgatgtttctgctgcctttttcttggctatgccatgcccccagaggtggagtctacagaggcaggcaggcctccttgagctgcggtgggctccagggtgctttgtttacctactcaagcctcagcaatggcagatgcccttcccccagcctcgctgctgccttgcagtgcaatctcagactgctgtgctagcaatgagtgagtctccctgggtgtgggtccctctgagccaggcacaggatataatctcctggtgtgccatttgctaagaccattggaaaagtgcagtattagggtgggagtgacccgattttccaggtgctgtctctaacagcttcccttggctaggaaagggaattccctgacccattgcacttcctgggtgaggtgatatctcgccctgctttggctcatgctcggtgggctgcacccactgtcctgcacccactgtctgacaagccccagtgagatgaagccctcarttagtacctcagttagaaaattcagaaatcacccatcttctgcgtcaytcacgctgtgagctataraatggagcagttcctattcgcccatcttggaactgccccccaacatttcttttctgaatcaattagctggtaaaatcctgggtagacccctccccatactcttttaaaaaattgtaaattactcataacacaaaacttactgtttaaccatatttaagcgtacaacgcagtggtttgtgatcattcacaatgctgtataagcatcaccactacccatttccagaacgtttttgtcatactaaacagaaactatatctattaaaccacaattactcattccctctgtccctagcccgtggctagggatatatacacaaaataacttttattttactttatgtctttaggagtttgccaatactaggtacttcatataaatggaattctatgatatttgtccmtttaggcctggcttatttcacttagcataatgtttttgaggtttgcctatgttgtatcatgtgtcagaattacatttcataactaaaataattttccattatatatgggaaataagtttaaagtccactgaagagaaataataaatttgtgaatgacagttagtaaatatcagtagcacacagtcagtggtcactgggaagactatagaaaagcagttataataaataatgtgtaaaaaagcaaaatatataacttgtccatgtctacccaaagtatgtatgcatgtggacaaggtcttgaagggaataagtaaacatgaaagttgtttttgggtggcaaaattatgtgtgatttccttcttatttcagaattttcttttgtaccattgacatgtttttatttttatgcaagattgaaaaaaacatggaaggcactagaaccataaagatgagaattatgaaaacagaataaatgctatttttctgtatttttcttttttcccagtagtcccatcagctatcaagtttcccctcttttaaggggaagaaaaaagctccctatgtatcatgattctttacatgcctaatcctgtcacccacagccatcaacaaagaatgcaaggcagattattcgaaagagaatagcagttgacatcccatagtgccaaacctgtgtttagacaaaaaagactttactgagagccctcatttttaaatgtacttcaatgcattgttgttcaactggaatgttccactctaagttatctttagtaagattttgccatttctgtaagactttgctgcctccgaggcctaatgtataagccagaaggaactcagttttcctgaaattaaggattcaatttttacctctaaatactggctttactctcaggctctcttgattaacttagccaatgatttttttcctccctaggtgcacacacacacacacacacacacacacacaaaacaaagggggtagaatacaaaaatcccagcgaattgtcaaaagttaaattttataactcctgtaaattgctgcttactaccagtttctttctgactgagtgagacataaatggcatctaactggatccaagccagttaattcccagatcaaatccgttcctagacccagtccattttctgttgcaactccaaacccagtttggatcagaaatttgctcaaagaaactcagctccaaacacaaatgtgtgaagctccaaaatgtgagattaagcttacctgtgattctcagccactctgagagatcaatggacacaagtggatcctgcaggtaccttccatgtttactaagtgctcctgggtatactagaaactccacttcggatttgcttctgacataatctgataaaataaaaacttcagctgaattaaatttaaaggaatataattgagcaatgaacaatttgtgaatccggcagccttcagaatcacagcagattcacagagcctcccggggtgcctcatggtcaaaacgaatttatagaccaaaaaaggtaaagtgaygtacagaaacaggaagtgaggtacagacacagtgagattggtaacaactgggcatttgctttatttgaacacagtttgaacattcagtagtctatgagtggctgaagtatggctgctgggattggctaacactcaagcattgtcacaagtgcacactactaaattaggttttcaattttgtctgactattaaggtaggttacagttcccccatgaggactcaaatgcagaagtacagagtccttctgaggccatatttagtttgctttaacactttgtggcaaaattcactgaaaggattgtctatacatgctatctccaatccccctcctaaacttatctaattgggattttgctgctaccattctactgaaacactttttaaagcctatgttattaaatccaagagtcaattattatttctcatcttaatagctcatcctttaaagaactttcttcacttctttccaagaaaacacactctcttggtcttcttttagcttcacttgttacttcttctcagtctcctctgtggacccttcttttctccccaatttcttcattttggatcacctctgagttcaataattggccctcatttttatccacacttactccctggttatcccatctgatcccatgcctttaatatcaatctacctgccaatgactaatacatttatattattactcaaactcatttccaaactcaaaacatatttatctaatggcctgtttgacatctcctggattccctccagtagccatctcaaactcattatgtctcagatcgaactccttatccaccctctccacccagcctgctttacctgtagtctttctcaacttagttgatggcaactccatcttttcccttgttcaaatgaaaacatttggagttattcttaagtatcttttcccctcccactttacatccaatccattatgacatcctgataattctggttggaggaaaattcttcatgacctctcacatttctgcatatcttatgagcagagactttgacagtctttgctcctgactagcttttcaaggatgtttgtaaagaggacagcttggaagctagagatactgttttcttctgaagcagagggcaggtttgcttactgttaagtataaaaaagataatgtcttcctctggagcaaagttcagataggtttgcttgcagttcattataaaacatacgtgttccctaaattcagggttccttggctgcaacacacaactattgcatttgcaacattaatctgctgttctgtattacctctgcaggacttatggagcaaggatgactgacacaaacacaaaaatcattctgcctgttgaatgaatcataaaatactgtctttgatccaggaggcttgtgtcatctgccagcatttatgaaactgtgctccaagtagggtaagcttttagatacttcagagttcctggcagtcttttctggatggagaatgtctttagtcttttctcaatggaaaaacagaatgctccttttaaaacaaaagccagattttgttattcctttgtgcaacccctgctactgcaggggtaacacccagtctcattcagagagacacaaattccttgtaacagcccctctaagttctccatgacttagaccccagtcacctccctgacatccctgagtgggaggcacctggcggtttcgcgctttccccgcgttttgtttgcgtcagagcagcgcgctggcgggagctgcagggcaaatatcccgccccggtgctttggtgtgtggcacttgctgccattctgccgctgtggggtgagcggcggtggcgggactagcacccaggcgggatccgttggcagcagcagagagagctcaatcctgatgatgcagaagcccagactccagcctactgcaagttccagagcaggctgtacccacgcctgcgtgagggctagagggacttggcctgctccgcaaatgatccaacttcccggacgggctggtgaacacagacaatgccagcctggataaggaagcggccagcactgcttaggcattgttctcaggacgcgcattactgagtgtggaactttaccctcctgatgaagacgccagagttgggtatccccaaagtgatgatcaaagaagtgctttgcatggggcttgagaaaacatcttactgtttaagaacagaacgtcttactatctaagaacctgaatagaaggagatgctttcagtattgggtgtttgaaaagttggtcaaagaaggggagacgatggttgattaagggggggatggtgacaattattttgtaactcatagaaggacagatgttgatgtaaaagttgatggttttggtggaataatcaagagcatgtttctgaaattaatgtaaaatatagagagacccctgaaatcactgcttaaattacacgggtgttgtggtgcttggaaagagaaaactttggaagtataattgtaaaaataatattatacagaaaaacagaagagaaaacttaaggacagctttctcaaatcgctgttattcttgaatcatctgaaagcagtataagtgactggcaccaatatacatcggagagtaaatcattgcacaaggaaacttgattttcttttcattatagaatctggagaaaaaaagctatgaagagcaagaggtggtagagaatggtgttgttgaaattgcctgacatcactggagataatttgccctggaaagaagcactccttagggaggagcatctgcacattccattagcataaagcacctggtcagccatatgaagaagtctggattttgttttaaatgtgaaatttattttaaatggaggatttgaaacaagggagtaatataacctgacatattttaaaaaatcactctggcagctgcgtgggggacaaactctgggaggacaagaggagatgtggaagggagaaggcggctaagagtctgtcccaggattgcaaagatttcggagcccggcctcaggtggtaatggtggaggtgttagaaatggctggattccacatatattttgaaaggccagcacrtggaatttgcttatggatgttccataaataagagaaaaagagggctcagtgatgattcctgggcttttgacttaagcaactagaaggataaagtctccattaactgatatggggaagactgaggaaggagacgctgtgtatgccaggattgggctgtgtgtgtgtgtgtatgtgtgtgtgtatcagtaattctacttttgacctgttgactttgagatgctaatccatgccagttaaaaaataaggagggaagtggacattcaacacgtgagggtgaatgcccacggagccttaagaaggggccagagggtgaatctgggagagaagaacatagataaaaataaaagacacatggagggagaaagagagggaagctaggacttatgatggtaacaatgttgttcattaactgagaagtcttttttttttttttttttgagacagagtcttgctctattgcccaggctggagtgcagtggcatgatctcagttcactgcaacctccacctcctgggttcaagcgattctcatgcctcagcctcctgagcagctggtattacaggtgcttgccaccaygcctggctaatttttgtgtttttggtagggatgggatttcaccatgttggccaggctagggtcaaactcctgacttcaggtgctctgcccgcctcagcctcccaaagtgctgggattacagatgtgagccaccatgccaggcctgagaaattgccaagaccagctcagtcgyggataccctaacccagtcgcactagaggaattaaagacacacacacagaaatacagtgtgtggagtgggaatcaggggtctcacagccttcagagctgagagcctcaaacagagacttacccatatatttattgacagcaagccagtgataaacattgtttctatagattatagattatagattaactaaaagtattccttgcagaaaacaaaggaatgtgccaaaacagagggatgggctctggctagttatctgcagtaggaacatttccttaaggcacagatggcttatgctattgcttgtggcttaggaacgcctttaagcagttttcctccctgggtgggccaggtgttccttgccctcattccagtaaacccacaaccctcagcgtggacttcatggccatcacgaacatgtcayggtgctgcagagattttgtttatggccagttttggggccagattatggccagatttgggggcctgtccctaaaaagaaatgtaattaaagtacagagaaaattaaaagggagaagaaagttcgtggagagatatcagagcaaatgataactacaaaagtctgccttgtttcccagaccccttgtctcttaggtgccctatattttacctcccagtgaaccagtcttgcccctttgtaatggcactccaagcagcactgccacacacccaattccagaacttccctgctccttgagcctaggaatagtcatgcttctaattcctctttacttgctcatcactggagtagcaactgaaccacacgattagaataagtaacatgatgtcatttttggtagcaatcttccatttcttccttatgtataaaattgaacctcacagagaaactaactgcctagwgctatgggtccagagtagagctctagctttgcgtttctctttgcagctgtgctctgagagatttgatgcaatcccactgcaatttgacatcagcgacagcgtaggggtgctcagggaatcttttgagccaccaasgaagcctcacttccagctaatacttatatggggctgtggaagttgtctcacattcctggggacagtgtttgccctgaaaaggaacgttcacttgccacaaagcatcttgttggctggatttgattataatgtgacaagaattcttttggccacataactggtggttgggtcattttgtgtttttcaaaccaataagaagaaaaggcctcttacatggtcaggagaggtgggaatggatgaagcactaaggtcaggtctggtgaagttagggaataaggccagcatttatggaaagtgatttccccatgaactcctaaaagatgctcctgaaccctaacagtaggctgatgtctgtatttagagttgcaaacaacatgttctgggaatacagaggaaggcaccactgcctctaacttgcgagtatatcacagagaaagatttatatttgggcttgatggatgagagatgagtaggagtttgatagaagagaagaagggaaccatctggatgtacaatggaagaagtggcaggaagggctaaggagaattggcttctggggatgggttagagataagggcctgggcaccacattatggagcttgcaatggggtatgtaaaagcttatatgggatgctcgttttctctcctcccatgggttcatagagggctcacctcactcactcttgctaacaagctgccctcattttagagagagctggagtggggtctctaaccctccagcaacagcttaggagccagacttgaagccctgacagccaacactttccatatagaccctgttgtccatcctatcttaggaagacaatgcactcaagaggaaggtaacatctaccttcggactccagaggctccaaggagcctctctctctcttcaagacaggcttcacctccaccttcatacagtggtactgggagatgaacaggggtagggcgatcaagatttagttcaacctgtagttccagtcgggtggtgcttggtagttgactcattttggtcccatttgatatttgcagccacctgctgggataggtgtaactgttgctcctatttcacagattaggacaggatagtttgctagaggtcagaggacgagttgcgggagggaatggttgtcagttaggtttttaaccttagagcctcatgttttcttaggatcttgcagggagaccttgggcaaattccttttcctcttggggggtcttcattacctttttgtaagttaaagagttctgccagtttgtgattctctgtactttaatgttcaaacttatcacttggataggttttttaaaatggggattctgggtacccccaatatatttaatttctctggggtgaggccgagattcatcttcgctgagctacatctgtagagattctgttttgataccattggttggactgtggctcggtaatttgcatttctccaaagtgagtccagtcagctggtcaaccgccccgcctgtctctctgtgaccccttccgggcgtccgctctgcttctgtacttgcatcctgtgggaatgagattggcgcaagcagccctcttttagtaccgccgggggcacgctagccaagcctttaaaaaccacgccgagccctcggtttgcaggtattcagggcaagctaaggcgcgtttccgcgtttggtatgttcccgagtgcggccagcagatgacgagagagaactagccagcagaataggaaggggcaaggaggccaggaagaaaagtggcgggtgaagattgacattcactaaaaccaatggtagcttccgttctccgactcccaagcttaccttaatggttgacatccattaaggccaatggtagcttccgttctgtgactcccaaacttcccattctcttaagaggctgcgtttgtggcgctaaatggaaggatgggcgtggggacatgtgctgggacatgtgctcgctgaagatacacctgttagtccaaggttgctgctgctcctagtggctcaaccctctttgacaattaaccttcctctcagtttattaaggctgcctcagctgtgtctaggcaaacctaccccccatcacgctgggtttttggagttttttaaagcgtcgcggggtaaagccagcattacacttttcgttttcttagcagataactatttctggtgctaacagcggggagctgccgggcgggagtaggggtgaagagagaatagggtgagagataacaggtgtgaagcgtcccttaatgccaggcatcctgctttggcactttttataggtttgtctcaattatctttttatttaattcattttctgtttcacagattatgaaacttcaagtaaattgcccaaggacagcccttgaataattttaacttctgtcaaacggcaaagcctaaggtcttttatcttgcagaggctgctttgtcaggatttcaatgcatgcaggtcctgcgaatcgctgttcctcactcactgatccatctcgctgtccacgcattcattcacccattcatttcttaggagctcatctgcaaggtgtggggctagttgctactaaaaataaaaaagaaaagggactctgctataaagtagaagagatttttttttgaaagatttacacagaattccggtgctcagcatggtttcgatctttccccccaacatactactgatacttattatgttccacataatatgatggattctgaagatacagagatgggtgagatgtatccttgcctatcaggagctccttgccataggcaagagtaatctatgagctttaattttacatacctawtttttaacgatttgagcatcaactatatatatatatatagttttgaaattaacatattaaataaatatcaggcacatttaatttcttattttttagatgaaggtgaatctaactggtggttcaagtatgttctttgttcaccctagtggaccatcttgggtgcttcctggagtgcttcctcagactgcaaccctacccccctggtatgtgcttggctctcttcattctgcagcactctgtcaaatgccaggcttttagggaggcctgttctgaccccttcctgtttcctctcccttttatcttctcctatctggaggctcttttcctatttatttgttgttctttctccctccatcatcttctcttcctgaatcmtgtgttgttttttcatatactacatctcagtatgtaggaaatatgtttactgggttttttttttcaaattttttttcagtttctctctccctgctccagaatgtaagcttcaagaggggcagtgaagagttcttaacacccctcactgactgagaaacagttggggatcgagggagacagctttgcctggtacatcctgaaatcccctgaggtgggggaggaagttgagggatcaggaaacgtccattcattttatgaacttgaagttgggttaaacactattgtcttctgtgacatttgttgttaatctcaacctgaaaccctcatcgctagtcatccacttcttactagctttgtgaccttgaatgaaggttcaagtttcccttctttctttgcacctcagtttccttatgtattaagagaaaaaaattaaatttgttaagcctaaaatgtggggtcatagggcatcaatcccctgagggtaaaagaaaaatatttgtggatatataagacttcagaagttatattcttrtgaggatcaaagaaaggtatttgtgaatttgagagtcttcagctatcatataagtagcataattacacacagaaaatattggagaaagaattttaacaaatcaaatgggaacagagatctcaaataggagcagataaaaaggagaagaaacmgtggtgagccaaaaaaaatctgacaaattttatgtagacagttaactctgaatggacaatgatagactctacaggaatgtgtataaaagttttaaagaagaattctttaaatagaagcgacacaccacaaggaaaattctatgacacctggaaataaaacatccagggattgggctcagggggatgaggggtaaagaaataaaagcattttgtatcacttagcacactcatctggatgggaggagggagcaaaacagggaaatgaatctattggaagatgtcatctyattgaggtatgggagaaaaagtggaatagctggcactttattttatataatagtaaagaaatttgtgctcaattatgagcaatagaagcatatactagtggttgaataaaaagttaataagggaatatgatggataagtcagttaataagagaacttggtggataagtgaattaataagagtccacagtggaggcaatttccctgtttataaaatgttatcttttgaatatacacaggatatacttttcgaaataaaaaaatatatataggggaaacaattttcactcatcctctagacacccagtacttttccagagataatccgttgctatacaagcataattccttttcaatatatttttctagcaactaagaaattcaggatttgtaattctaataaaaagagtgctgatctgggctgaaatgaaaagttttaccttagatatatgtctcataaatagtttttataaagtcagggaatatccttaaaaagcaattaccaaggctgtacaacacatgagtttgaaggcacagggagattaagatttagaataaatttaagtgagatctagggccaaagaatagcagggtggtgtttgtgtgtgtgtgtgtgtgtgtgtgttggttggggcaggtgggaggctttggagtttgcctgtagactgctatcatctctaggccttggtaagtccttgcaaagacacacagttctgaaaggttggcaccggtgtaggtttttaaatatttttgttatccacagggtgaccctggacaccgttacaaaaatttaaaaatttcacccctaggcacacagattacccttctcgtggtggcatggcaaggcttgatttgcaagagtttcttttggactgtcgttaatttttccctttaaaaacaggagctccttcatggtgacaaaggaaggaggaaatcatcccttctaacctactttgtcgtcttcattccaagaactctagaatggcacagcacgtttggttttgaaacctgtggaattttagtgctgtccattctcccaagtgtatgcctttagtgaaggtaaaaggaaagactgttttctgtgtcaagggaagattcatatgcaaatcccaagactcagatgttatttcagaagagttggtgtccatagtaaagtagaactggcccaggcttatctgcctgaaagggcaactgtttgaggtagagggaactggcagaataggaggggtggaatcttcctgggagaaagtaaaaagaattctaggtggagaggagatcaagatgtgaaccaaacacatgtcttctaaattactataggaaatgttggaaaggactttagaacaaacaataaatatgtcataggaggaaaacaaagagaagtctttgggccagaaatagaaactgttaaaaacaaaacaacaacaacaaaacataaaaataaaaaaaaaaacctttaagtttgaaaatgacagaagttaagaagtggaaagttgcatgggatatgctttcattgcggcctctctgataaaccattccccagtccatctttgtatccttgcttgtcctaagcagcatggtagcagccgtggcattcatcaggctaaagtggtcatttttggcacttgggctagagatggcagtgaagcagaatcatttgggtaaatgccagaggctttttgtctcacaataaggaaattgaagatgtagacacagaaggagtggatttaagagtggaaggttaataggcaaaagaaagaagagagagttccctgtgcattggaagggtgcctgagcgggtttctgggtttggggcaagttgcggctggttttatagatgagcttgaggagccagtgtctgatttacacagggctcagagggttggttggaccaggtgtgaatgcacgaagaggctggccatcccatcctaatcttttattatgcagatggggtctctatctggccagcgccatgttgcctgaacacttgaagacaaagaaaagggaagaagaggcagggcgccgtagctcacgcctgtaatcaccgcactttctgagggcgaggagggtggatcacgaggtcaggagttcaagaccagcttggccaagatggtgaaacctcgtctccactaaaaaaaatacaaaaaaaaaaaaatttagccgggcctgttggtgggctcctgaaatcccagccactcaggaggctgaggtagagagctgcttgaacccgggaggcagagggtgcagtgagccgacatcgccccactccactccagcatgggcaacagagcgagactccgtcaaaaaaaaaaaaaaaaaaaaaaagaagaggacacctccatgttgaacatgcgagtatgcctggcttccaagtatcccttttctattggcataggtgccggcattcccctttgcaagttttagcttgcttatctatgcttgcagctgatttttcaggctgattgttgttagaaaacaaaattagatgggggctgcttttttattaaaaggaaaaccttaccaacgactcccttacccacactaactgcctaaataattgatttttttagctcctgtatcagcagtgcttgcccctgatagatgatgatcatggggggaccaggagcctctagacttagagaactttccccaccctccctgtggagtgtttccctccccagcaccccctgctggtcagtttgacaaacagatgaacagaagttctcaaatacacagtaagcagataaccccaacatcaccagaaatatcaacttgtgatggcattttgtcaagttgtctttgttatcggcatcatctgttgctttctgagggaagtattttgagttctcctactgagactgtggatttgcctatttctttttgtatgtcagcttttgccatatgtattttgtagttgtgttgtgaggaagattcatgacttatcttgtgggagaattctgtatttagcagattttcgtcttaagttctgttttgcttagtattgatgttattactttgctttttcagtttcaaaatcatttagtatatctttttcctttcttttagsctttgtgtttttatttcagatgtgctttcttatgtactgactgtgatccccaaattcatatgttgaagtcccaactccaaatgtatttggaggtgggcctttcagacgtaattgagtttagatgacgtcatgagggtggagcccccatgatgacactaagtccttctaagaaaaggaagagagtctgagccctcctctacaccatgtgagggcacagagagagagcagccatcaacaagctgagagaggaggactgagaatgaaacctacctcgccagaaccttgtcatatcccttcccggtttccaaacgagtgagaaatcaatttctgttgtgtaagctactcagtgtatgaaactttgttatggcagccagagcagattaatgcatgcttcttggactttgtttttaactcaatatgaaaaacatatgttttaataaaaaaattaccccattcatctgtattgtgtttactgataattttggacttatttttgccatatttaagaaatcctccttcctctttcccatgcyttcttgtgtttttttaatccaagtggatgataaggtttgggaatcactatcgtaacaggaccatgaagggctagataagggaagctggcttgcattcagggaaggggcagaggagggaagctgccagctgggctgagctaagatgacctgagcttacagaccctggatgagcatcctcttctggatacaggacctgcccgaggcaccattttgaaataggcaaattttatttgctttgtcttctttcatcatctttattagcttttgcatcttgagtgaaaaatatagctgttttcatattaccccaagttcccgagtttattttttatgtaagaatgttccaacctttgaaatcccaaatgacatgtttcctctctttctcagaccatgctttcatttcagtcaatgtaacaaatcagccaggtcttaggagtttagaaatctgattggattgattcatactaagcggtaacagatctaccacagccttctaagatgaagttttttaaaaatgctccatgacctacacaattctttaattgctggaattgcacactttaaaatcgcatcaaatataaacattcaattttgtggaagttttgttttttatggagagatgaaaataggtgtttcttaatactggcagactttacttccaaagccaattctattaaagtatcttttctgcttcaaatctagactatcagaaagaatgaaaatgccaattatttattttttttattttttattttgctatagctgcaatgttcacagtaatccaagttccaatggcagggtggcagagtggaaccaaaagaggccaagttttgttggtgaagtataattattttttaagatcagggattcagaattgtagtatcartgttcagttaggaagttcttatgatagtgcatggcacatgtcctttccatcatctgcattttctgctttttttgtctggctcacttctactcactctctaatcctcaccttagtggtcacttctccccggaatgtccctgaccccttatgatagcagtagtgcaaacaccaaaggctgaacttacaaccagactcgcaggcaacaccttgccttgtgccatgcttcaatcaygaagaggatgtgagaaagagtaggagaaaggagacacaaaaaatggcatttccatagcagagacccccaaggccagtccatttgattctctggatttcttttctgtacaacagtgatggaaggtagcctgggaaagccattcgtctcaggcttcaccttggatacctttctaytcactgaactgattccattctttagtgtaccattgcctcataaatccagaaatagcagggacattcatttttgataaagtatccatacagattaggtttattctattgaaaattttattaaaatccttcatttatcttccagatagtagattctattaaccaagttgcataaagagttctgattcccagaggtaagaactgagcctggctttctagttacatgtttactggtaaccccgtctttccctataacacttaagcatatttaaagaatataccctcccctgcctccagccaggattgtaagctcctcaagagcatggctgtgtcttttaacatcaaggctccaggtgagaagagttcctgctgtattataagtgcccaatatgcatttgtaagtgaagaaatctattctgtggtgtctgctttaatattaagagatggcttggcagagattactaagcagcttcattgtctaaaatggaactagattctgtgggtagcaagtccattggtgccactcacaggaggcctcaaagaaaccaaactgccccacaaatctgcgggagtcttcattttcttccaacacagagatgtaaaatggaatattcttctgacgcagatatttcatgtatcgcaccatcactcgtgccatgttgcctgtccttcggtatttttccatgctgtaggccattcctacttcacaagaagggtccatggttacccatgagacygggactccctctgggccgagcatacaggctgctggcaggtcttctatgcagcgcttgatgtaatgcaggctcctctcattcttccctcgcttccagttgtcatttaccagcccagaataagagacatccagctgggcatacttaaagttgggagtttcactgtagacaacaaaaagaaagacaacaactttcatccccaatcctgtaatttctaggtgccatcccaatctagagatcccaggaactcttcttgtttaaagactcaccattgcaaagttttggatcttgaactttgacaacctttattcatcccaaggaatgaattcatcctctcttcattccaaaactgatttatgtgaattacaaaaatgtacaaggaatcgcaattataaatgatcagcacatgtttttgtacctttcaaattcatcatctgggtggcctgtctcagcccagcttccaagcttgcttttactggaggcattgagcttcagaatatcttccgtaaccaagaggagtgctctcgaatgctctactttcactgactttgaaaatgtagccactcttatcccctcacctaaactttcttgaagacctgggaagaaagccaagaaagcaatcttgtcagacatggagttctctacttacactgctcccacctgattaatacctcagtgcttagtagttctcaaacttgagtttacaccacagtcagatggagtccttgtcacaccacagattgctccacctctcccagtccccagagtttctgtgaatttacatttctaatgagccctcaggtgatgctaatgctgttagttgaagacacaatttgagaagcacagctgcttgcccatttcttcagactcgttaccttggatttggagtctctgtttccagtttacgatctcacaatttttcaaaacttcttctgatttttgaggstctttggagaacatacgatatacgtttgtgtatgaatccatgtcatcagtcatctcctgtattggatgatataagatcaggtcattcccttgaactttttcttcacctctcactggttgcaattatcagaaaaatgaaagttcaaaagaaaattttaacagtggcccatgatggctgcagttgggcacatcgataataaaacctaggcctataagctaccgctgacctcttacctgtgtaactggagtttgttaaatatttaacactgacaagtattggttataaacctccttatcacatgcagaactaagacaggatgaaatcagtcaccctccaccaggccttaagatgcctcacctttctccctacccactcaactgcacacataccctattttatatatagcatcaccaagcacccagcagaataaaaaaatgcaacaattgcttctctccctgcttctcttaccacctgtgccaaacggatactcctgttatatatactgtgccccaggtaacctactgtgggacacattctgggttgtactgagtttgtgttgttaagagttaagtccttaaacttggctcaaaataaatttaactgtgatttctctaatttttagtgcctactgtttcaccagacacctagagtcaatagtgtcctagaatctacggtgtccagggcttgagcaagatactttagtgaatataaacactaacgagaccttgccttttctcaagcctacaggatatcagcctatttgaaaagtgacactggctttacacccagaagcccacaaaatagaatgatgtaactgaattttttggtagctctctgggtaatttatgtggtgttagactcttgggtttgaaagaaagagactcgtgatcccattctggcatgacagaaacttcattggaagatgaggatgtttctctgggaaaatataaacaataagtgtgagcgttttagcagtgaatgtattaatattatgttggaaattgtattgctaaagagttaaagagaaaatagtgtaattaatttaaagaaaccttcaagaatttcagggtgcttttataaatgcaagttcctgaatatggtcaaacccaaaacgtcagtgaatttagaagagtagatgttttaaaagacctgattttaaaagaatgaccaaaaatagccaagtaaatagtcaaggaaatatataaaagaatatcaaagtaaactagaaaataacaaatggaacaatttgtaaaaatgaaagctataaataatgaaatggagaacaagacatagtgcaaaggatatataaagccaaaagttcatttttaaatggcaaaaacagagagagaagaagaaagagagagataaacttctggtaaggcatttattaaaagaaatacaagagaaagagaaaaaagcaaaaaaaaaaaaaaaacagactgtaagctatgagaacagaaacagaagaaacagagaaaagaacaaaagacttctaatagaagactacatactactccaaggcaagatatttactgataaaagaaatggatgttatccctcaagaataaactatcaatattgacttgcaaaaaaatagaaatcctgaacaaactaatagaaaatatcagaaatgaaattaaacatctaccttttaaaaagtagacaagagttatggcctccagcttcagccatgttgctacaaaggacatgattttattattttctattgctgtgtagtattccataaaaatatatgtatcaagttttttttatccagtctacctttgatgatcacctgggttgattccctgtctttgctattgtgaactgtgtagcaatgaacatacaagtgcatgtgtcatgttggtagaatgattcattttcttttgggtatttacctagtaaagacattgctggatcggatggcaactctgttttaatttctgtaagaaatttccagactactttccacagtgcaataatcctaagcaaattactgctgtaacagaaaatcaaatatcacatgctctcactcataactgggagctaagcattgaccacacatgggcataaatgtaggaacaatagacagtgtggactaccagagggtggagtaaaaggggctgggttagaaaactacctattgggtactatgctcactaccaggatgatggaatctgtccatactccaagaatcagcatcatgcaatcttcccatgtaacaaatctgcacatgtacccccgtatttaaaaagaatgttgaaattaaaaaataaaatgtagccaaaatcagattattttacatttaaattctacataagccaaaaacaaacacatgattttaatagtagactttggtaacagatgaaaagatcctaatgccaaatctggtaaggaaataacaaaaagagagttatgacaacattcccttatgcatgcagatacaaaaattatgaataaaatattcagtagcatatacaaaaaatgtgaatatgaacagttggttttagaaaggccagratggctttgattggaaggtcttttagtgtaataaattagaggagaaaaaaattacatgagtgtataaattgccaaatagaaaagacaaaaattaaataacataaaatttaccctccattctaaatataagttctatgaaagtaggagcaacaggaaaatgctctaaacctgcaaatacagaatcaaatgtaattccaaatgtaagcttttatagctatttaaaatcagggatgagacaagtatagaactattattattattagttggaattgtttccttaggttgcatattatgcaataatgcaagaaactaaaaacccatacaaatactggcaaagcagcagcaaattactttgtttgtagattacagtattacacatttagaaaatccaagagacttcgacaaaaaaamaaaacaaataatgccccacacaaacaggattttaaacaacagtgggacatatttggaaatcaagactacaaacacaaagcaataacaaaataataatgctcagaaatataacaggaaaataatttaataatcttaacaaatagtataaaatacctaagggtaaacttaatggaaaaatcacttagtttatcacaggaaaacactaacattttaccagatggcatagaatgcaaactgaaaaaaagtgagaaaaagaccatatttcttgatgaaaaaatttagtgtcacaaaaatattaattcttccaaaattgtcgaaaaatgstcctccaataccaatcacaactcsaatagttatttgggatagttggtggggaactggaagaattagttatgttcatatagctattaagtttataagaaataggaaagtaaaaaaagattggtgaagggtgatttgctttattagatattaaaatttaccacagaaacaatgaaatagcatgagaaaagactagaaaaaatacagaaacagatacaaaaatatataacatgttataygacaaaatagacatttatatttcagtagggaatgacttatttaagaaatggtactaacataattagccagccataaggaagattaatataaaagaatgttaattcatgctattcaaaaatatattccaaatagaatgaagtttgcaatgtcaaaagtaacaattaactcactgtaagacaaaatgagaaaacagttgtatgatcttcgagtagcaaaaatcttcctaattattaactaaaaaaacccaaaacctcagaagtcatagtgaaaaagataatatatttgattacatgaaaataaaaaatttcttaatgtcaaaatctccatcaataaaatagaaaataattataaattgggcaacaaatttgtagcatacacctttttttagtatccctagtttccaaaacacttacaaaattttaagaatgacacaaaaccccagtgtaaaagtggtcaaagaatataaacaggtcaaaagtaaacaccaaatgaccgagaaacatgaaaatataatatgttcaatatcgctagtcagggaaatgcaaattaaatccacaataagatgccatttttcacccaccagtttgggataaattaaaagagggataatattcagtgctcgtgagaatgtggggaaacaattcttccatacattgctaataaaaataaaattgtggaatcctttgggaaggtaatttggcattgcctgcttagaataagataaactgtaacttgcagatattccttttgraaatcagttgtactgagaaaaatttccaggatataaagatatgtatatgaagatgtttattgaagcttgtttgtagtggcaaagaagtatgaacagtttgaacccaacagcaggagaatgattgactaaatagcattgcattgactctatgaaatgccgcagttattaaaacgaatactttagtgctgtattgattcacccaaagtgatgtccatatgttaaaggcaaattaagagtgatgacaaaagagatcatcagtgaatatccctctgtttatttttttgtttttttttttttagacggagtctcgctccgtcgcccaaggctggagtgcagcggcgggatctcagctcactgcaagctccgcctcccggtttcacgccattctccggcctcagcctcccaagtagttgggactacaggcgcccgccaccacgcccggctaattttttttttttttttttttttttttttgtatttttagtagagacagggtttcaccgtggtctcgatctcctgacctcgtgatccgcctgcctcggcctcccaaagtgctgggattccttctgtgtattaatatgggcaaggacactgattacaaccaaggggtaggaaaggaggagaggaggggaggggaggtaagaggttattaactttttaaaatcatgttggatttttttacttgtataatcaacatagattatctttgtgattaaaaatcaacaatgaaaaaattaatttttttctagataaattctcctgcatcccaccctgaaaagctcttattcaaaatcagattgactttcaatactgaaagaaacatggtatgctatggaatcagactaggtgaatgcacttccaagtaaattgcagcgtatttcattctttcctttttgttttttktttggtcttatatgtgtggtgtgggacttttatattttcatatttttgtttattgactcactgtaaaaactaactttgttcaaagcaatgcatacatgaaggtatggcttgatgctatagttacgttgctaaaatacatataataactacaaagttactgaagtaaaaggaactatttgacttcctacagttatctagcataccacactttgaagaaattggaccattgattaaataaactaaacattaatctttgatcccaaattgtcaggaagccaggagatcaaaagaacatccctgaggaaggtgttaggctcagcctggttcccatcccctttacccctttgttcctcaagctagggtcactttgtcactttctgcatccgaatcctgacccagtttgcaaactagtcttgacctggtgtggcttattattatttgggggctcagcgtttacacctacatgaagttgggctggcaatgaggcttcagtttactaaccagatgtgtatgaaacacacaaacacaaaggggaagtatttaggaaaaaaatacacctaggtttgtattaccatttcagctccatcatttattccttgtgtgtcctcagccaataatggctaattattgtaaacactatttacagttatgtgctatgtactaagtgtttaacatacagtatctcatttaaaccttgtgtaatcctctgaagaagatcctcttattttccccattttaacggatgatgaaactcacagaagtgcctatggttatatagctagtaaaagtggtagagtccactgcacttgaattcagactgggcaatgctttaacatcaggaatccagccgctacatgacttaatatttctcaatgttgtttccttatctgtaaattggagatattaatgctcacttcataagattgttctgatgataacattcactaacgagagaagtgcttccacacagttgacacacagtaattatgagtcccttccctggttcctaagaagtaacttttttttttgaaaaacaaaacaaaaacaacagggtctcactctgttgcccaggcttcagtacagtggtgtgatcttggctcaatgcaacctcgaccttctggggctcaagccatcctcccacctcagcctcctgagtagctaggagtataaacatgcaccaccatgccctgctaattttgtttattttctgtagagatgaggtctcactatgttgtacaggctggtctcaaactcctggactcaagtgatcctcctgccttggcctcccaaaatgctgggattacaggtagaagacaccatgcctggccctgagaggtaattttactggtagacttatgccttggtttctgtttctaagccactgttctratatctcagacacccaactttccctgtaaattggcctcctttcagcccctgcaggtgacccctgccacctcatagggcccttaatctgtgagtgtcagccttgtccttttcctccctttcctcctccaccccctttcccagaagrgtcctatgctttacacgaagggtgggaacacgtggcactcatgcaaggtgcccagtactgaaggagtgttttaaaatactcacgtttcctttcaccctataaaagcagccmtggtgtctgaactggtcagttcctcaggccctgtggacctgcctggctccaccagtccctgtctgtgtgcctacctgcttttgaggccggataataaccatctgatattcaggccaggaatccaccagcacctccatgttgaaggggttcccgtgattgatgtgatacacagagccatacacctgaaggagggatgaaagggaccaggagaggttgagatccccagaratgaggatctggttgtgaagaggaagagaaaaatggagattaagagaaggtactgagaccaagtcagtgatggtgagatgagcagtatggtcctggagaggaccatactgatggacgtgaagttaccagcaagcaggcagaactcacaggtaggactgtccttgtgataccaaagagctactgtgtactagctgggcacttggcaatgctcttagcatttatattgtatagatttattcagtgtccatagcaactttaagmggtaggtgctaacgttattcccatctcattgatggaaaaaccaaacgtaaagtcagagaaagggaaagaaacatccacaaagccatctgactagaaaatggcagccttggaatgcatatccattcagacaggctccaaaccatgttcgtagccaccatgctccactgcctctccaaatgagtggcaaaacctgcagagtggacctagctgcctcttcccaaagagaagcagcagctcttgatatgcagcctgtgcccccagtcccatcctgtttcccagctccaaccctctgcaaacagtcaggaaggactagaatcacaagcctgctattttctcatcctcaacacccctactcccataccctgacctcccactgttccctgaccttcarggactcagggatgctcctggccaaggatttgtatagggccagcagcttatgggagttattcagtaggatcattctgtgggatgcttcagaccttgagaccttgaagaagaaactctgaaaagataakaaatgaagggaaaatgttaaggaaacaaatgaatttaaaatgcactttatacatctccattcaagtaacactcgtgatgtaggtactgttagtatcatattcattctgaatacaccaaatctcagagggactaagtaaatttctcaagttcttagagataaatgccagagtcagattttgaaaccatatatgactgkctccaaaacccatgcccttcctcccttgtggaaagaattaaaagtgaatattaagagttctgtgagcttcccaaatgcctgtaacagaacactccaccactaccatcataagttttttcctgtattttggtcattatatgcctgagaattcttctttcatctgcaayagaaaatatcagccctctaagaacaggtatgactaaaaaacttggagcaggagtaggcatagattttctttagtttctcagggccaaatatttcaaacctacggccattttggaacttatcccagtttcattacaaaaattaaaaacagatagaaaaattttaacacatatctgtaaacttttgttgaaatatcattcagaattcttagaaatgtgccaataatttaacaataacttggagaaggtgatcatcacaactgataggttcaaagcttaggctgatttcaaattttagttccatctcatacttctttgttaagttgcttaaccaatcagaacctcaaagtgttttctcacaactttggaactggaaattagaatgcatgttttccaaaggattgagattacacaatgtaatatgtataaaatgcatagcattatgcctggaataaagtaagaacaagttttaatatatgttagtttttttaattgacttcatattaatcaacatgtcatatagagatttagcaattatattcaatgatgtaaaaataattaaaaatgtgaagaacttacmacmaaattaatgtaagagaaggaacccacgaatcagatatttgaaacaatcatttgcaaatcagttaacacagatttttgaaattttttatccatgaagttaaaatagttaacaaatatgtgttaagtaataggcaaggtgaaacatattttatcttgtctggggtcaaaggcctcaaagttaaactatgttctgtagctagatgaagcaatgtttaaacaaaggcatccttttgcaagatctcataatttcagaatgtttgaatacccaaggaacttttagtaaataaaactggatctctgacatgagcctatcccctgtctgactctgctgttcttgtagctgtcaaaaaaaaaatggtctttttcttccccccatctccaagtgctttctttgctctgtttctcacctgatttaactaaaattgcccatacccatgtgtttcactatkgtcttctcctttgagctttkggtcaagattttaaaagttttaattcaagatctaccatgctatatcactccccgcaaaaaaacttgtgttccatttgccctgggaacattatatcctgggctgatacatgagaacaatmcccacacctatcagctgccaatmtttgtccaaaatacccctcctgtgcattccctactccatccccttgcaatgacctttgttgagggcctctcctcatacttaatattgctcttgtgaccccaccctggcctcagcttctaacatctacccaaataaaagtgttctctacctgtattcctamcatcaacatttcttttctaaatcaggaagctgctaaaaacctggggagacccctccccaccttctttaaaaaaatcgttgtaaaggacacataacacaaaactaaccgtttaaccatttttaagcgtacaatgcagcggtattgtatacattcatggtgcttatccatttccagagcctttttgtcatcctaaatggcaactatacccatgaaatcacaattactcattccctctctccctagcccctggctaggggtatatatatatatatacccctatatataatatatatattttatatatgtatataaartaacttttactttatttctctaggaatttgcctattctgggtacttcatatatcatggaatccgatgatattggtccatttgggtctggcttatttcacttagcataatgttttcaaggttcacatctgttgtattatgtatcagaatttcattccttaactaaaataatttttcataatatatggaaaataagtttaatgtccactaaagagaaattataaatttgtgaatgacagtctgtaaatatgagtagcacacagtcagtggtcactgtgaagactacagaaaagcaattataatgaataatgggtaaaaatatcaaaatatataacttttacatatgtacccaaattatgtttgcatgtggacaaggacttgaagggaataaataaacatgaaaattgtttttgggtgrtgaaagtatgtgtgatttatttcttatttgagaattttagtttgtaccattgagatgtttttatttttatgcaagattgaaaaaaacatggaaggcaatggaaccatagttaaatatgagaattatgaaaacagaataaatgctatatatttttttcttttttccccacagtcccatcagctatcaagtttctttatttgtagggagaaggaaaaagctccccattcaccacaattctgtacatgcctcatcctgtcacccacagcagtcaacaaagagtgcaaggcagattattccaaaaagaatagcagttgacatccaatagtgccaaaactgtttttagtcaaagagactttactgagagccctcatttataaatgtacttggcattgttgtttaaatgcattggcattgttgttcatttggaatgttccactctaagtatctttagtaatgttttgccatttctgtaagacttggtatacagtcctaatgtataagccagaaggaactcagttttacagaaattaaggatcccatttttatctaaaatattgtctttattcttaggttctcttgatgaacttagccagtgatttttttcctacctaggcgcacaaaaaaaaaaaagaaaagaaaagaaacaaaggggtagaacacaaaaatccctgtgaattttcaaaagccaaattttataactcctgcaacattactgcttactaccagttcctttctgacccagtgagatgtaagaggcctctaactggatccaggccagttaattccaagatcaaatctgttcctagacccagtctgtttcctgttgtgactccaaacccagtttggatcagaaatttgctccaagcaactcagagagctcaaaacaccaacgtgtgaagctccaaaatgcgagagggagcttacctattatcctcagccactctgagagatcaatggacacaattggatcctgcaggtaccttccgtgttcacttcgcgctcctggggatactagaagctccacttcagatccttcttgtgacaccatctgataaaagaaaaacttcagctgaattaaacttaaaggagtttcattaagcaacaaacaatttgtgaatccggcagcctacaaaatcacagcagattcaccgaggctccgggggtgcctcgtggtcaaaatgaatttatagacaaaaaaggtaaagtgatgtacaggaaccagaaatcaggtacagaaacaaagagattggttacaactgggcgcttgccttatttgaacacagtttgaacattcagcagtctatgagtagttgaagtatggctgctgggattggccaacactggagtattgttacaggtgcacactactaaattaggttttcaattttgtctgatgattaagctacgttacagtttacccacaaggactcaaatgaaraagtacagagtccttctcaggctgtaattagtttgtttcaacrgtktgtagcaaaatttattgaaaggattgtctatacatgctatctccaatccccctcctaacctcatctaattgggtttttgctgctaccattckactgaaacactttttaaaaccatcagggatctctgtgttattaaatccagtggtcaattattgcttctcatcttaatagatcatcctttaatggacttggtttccaagacaacacactctcttgttttttctttaactttactgactactttttctcagtctcmtctgtggacccttctttcctccccagtttcttaattttggatcacttcagagttcccggtgatcccatctggtcccatagctttaaaatcaatctacctgccaatgactaatacatttaaattactactcaaattttttccaaactcaaggcatatgtatctaacggcctgtttgacatctcttggattccttccaatagccatctcaaactcattatgtctcaaatcaatcttcttatccaccctctccacccagcctacttcacctgtagtctttctcaacttagttgatggcaactccatttcttcacctgttcaaagaaaaattcttggagttattcttaagtatcttttcccctcccactttacatccaatccattatgacatcctgctaattctggctgggagaaaattcttcatggcctctcacatttctgtatgtcttatgagcagagacattgacagccttttctcctgactatcttttcaaggatgtttctaaagaggacagcttggaagctagagatattgctttcttctgaagcagagggtaggtctgcttactgatcagtataagaaagataatgtccccctctggagcaaagttcagacaggtttgcttgcagttcattataaaacatccaggtgacctaaattcagggttccttggcttcaacacacatctgttgcacttgcaacattaatctgcctttctgtatttcctctgtaggacttgtggagcaaggatgactgacacaaacacaaaaatcattctccctgttgaatgagtcataaaactctgtctttgacccagaaagcttgtgttatctgtcagcattcatgaaacattgccccaagtagggtaaacttttatatrcttcacagttcttagcagtcttttctggatggagaatgcctttagtcttccgtcaataacaaatgaggatgctccttttaaaacaaaagccagattttgtcatgtctttgtgcaactcctgcagcaactcccaatctcatttagagaaagaggtacaaattgtttataacagttctctaagttagactccagtcacctccctgacatctgtccagtcaggtcctagacctcactctctttggcctctctgcttcaggcacttggctgttctttttcttctgcctgcattctgttttcttattagacctataaaaactctattaccttctttaagtcttcacctaaaagccacctgctcaataaggcctcctttggccatcctattaaaaattactactcctcccctttgggtatatacccagtaatgggatggctataaatcatgctgctataaagacacatgcacacgtatgtttattgcggcactattcacaatagcaaagacttggaaccaacccaaatgtccagaaatgatagactggattaagaaaatgtggcacatatatacaccatggaatactatgcagccataaaaaatgacgagttcatgtcctttgtagggacatggatgaaactagaaatcatcattctcagtaaactatcacaaggacaaaaaaccaaacaccgcatgttctcactcatagatgggaattgaacaatgagaacacgtggacacaggaaggggaacatcacactctggggactgttgtggggtggggggaggggggagggatagcattaggagatatacctaatgctaaatgacgagttaatgggtgcagcacaccagcatggcacatgtatacatatgtaactaacctgcacattgtgcacatgtaccctaaaacttaaagtgtaataataataaaaaaaattactactcctcccctagtctccctgcaatgcttctgtgccccattgtcattctctgcctctatttgtctttttgacagggtctcgctctttcacctaggttggagtgcagtggctgaatcaagactcactgmagccttgatcattcaggctcaagcaatcctccaatctcagtctcctgagtagctggaactacargcatgaatcactgtgcttggctaattgtttaatttttattttatagagatgggggagggggtctctgtttcccaggcttatctccaactcctggtgacaactttataaacttctgtgccaaactctcatacctcaaaatatctagcagaaacaaatacaaaacccagacaaaaatgtatgctgacaactatgatgacatttctagttttattttacaaaattttaatgctagcttgctaaagatttacttaagtagcatgaacatgaaaaatactttggacttgtttacttaatctatgagcactcttttatttataatccaattgggtagtcacaacatttaacgtaatacatatgcctacacattaacacatctagacatacatacacccaaagacacatctagacatacatacacccaaagatccaatagcttttaccttggaactctagctattgaaatagaaactcatcagtctgcaaacatgttcacatggctgaactttgttagccttgataggtaatccagtgaaggctgtgaaccaaaattttcagtaaaacagtttccgtggcagtttaatttttaaagtccaaagttctccagactccaaagaacactggggtcaaacagcaccacaggagaatatcacatactaacttggcccaacagcagcagcacaaaagcctggatacatggaactccaacccactttcccattcaagggcaaataccagattccaaactatactggggtcaaacagtgttacaaaagagtgtcagtttattaaattctgatttctgatgactatatcagacacttgcaaacaatcactaaaacaatccaactgttgcagcatcaaacaagccccaaaagtctacaaactgaaacagttggggtgattcctctctccattggttgggctcaatcaacctgcaaatcaaaattccttcagaatttctcaaatggagaggagctgatcccactatctagtacccacaaaagacactcacttgcctggacacacacacaatgacaaacaagcccccaagaatgtccatactgaaacagtcagggtattttcctctcttcgtcagttgggcttattcaacccgcaagtggaaattcctttaaaaatttcccaaactgagaggagcagatctttctgtctgggcccacaaaggacagtcacctatctggatgccgatgtgaaattccaaaggcagttcttccaaggcaatcaggaccatggttggggccagctgtggtggccccagagggtacttatctctccagccaaaattgggtaagcagctgcttagtagttctgtgagactcctggcccatggcarctgagccaaagtgttcctggtcgggaaaccaaaagctgttactgaaacaccaggggtgtggtctaggtcctgcagctcaccacacagaaagccaatcaatataaccaattgccaaggaagaaggctgagttggatgctgtagcagaggagatgcaagctcggtctcaaatccrtcttgctgatcaactaaaattatgagttttcatagcagtgaagaaatgtaacaatgtgtagaaaaacaggaactcaggmgacctaaggaagcaatcataatttatgaggggtctggtgtcccattgtctggatgggatcatctggtgagtttcaattctttgatactttttgagggacgtaggggtcctttactaaggatgaaattcatataaaacaaataaaagtttcaagcattaagatcagaagggtcaatttctatgtttatacaaaaaaaattctctatgggactacaggggaggtttcaattccactgccagtgctagctccagtcggcctcaagtctgcctatgattctggcaaactgaatcaggaccttggccaggagaatagcttcctctcccatctctgggctcctcaccyatctgtagggctgctgagcttgccagtttcttataacacttcagttccagagcagactcctttgcatcagcctttcagaccagctctggagtctctctagaactcagcacgtgcatatggggtgcagagggatacggctggaactagacccctgtgctttcctctcagaaacacatgctatctgacagagtggttactctctaggactccagcaggggattctccaagtccacttctctgatgtatctactctgtggatcaaaactcaaaggtttagccttatgtgtcacaacctcagggctctcygggcctagcttagttctgatatcagtcccattgtactcagtattagtcataagtgacttcatgaaacactcgtggcagcttggattctgacatgaacatgggatctctgaatggaagcaatgaattctggtttcacaggtgctgaggttatgctcatctgctttgggcttttcaggctgtgtgagagatctctgattctaggtctctccagctggctacccctgaatgttcttccatctttgggactttgcaggtccatcatggggtcatggtggaagagacaactaggataccatttaggcatggccccactttcaaaaaagttcccaaatttgagattctagtgttatcacccaatggtacagaaacacagacagaatggagaacacatgcaccataaattacacactgccaagagtccactctgaattaatgctttataattcctgcactgatcttgtaagtagaacaataatattgcatggcatttttgaggttgtaagcatacatttatacacatttaaagctattatattatcaatgtttagcctacctttacgtgttggtgtacttcatactacaaagagtggcaatgatttggccacctttgaacccctgtgaggccctgaaactcttgctcatggcagggaatgggaatagtatggctgagtgtctgtgggaggttgatggagccccaccctctgtgtactctcacaatgtgtcaagggtctctgggatgcttctttcatatcaatgtccttcwttaacccttagcaatgtgaaactgggatgcagcagccatcgttggaagacatctgatagctgttggcacctattcataaaatctgaaaacttcctagggaatctgaggagagttgcctttgcaagatcatttggaaaactttggagactttgcctcctagggataataaaattaataagattatggatattaatcatgtttgtttcaggcacggaccgaacagtcaaagaatcactctatctcaatctaagtcataataaattcaaagttactttgaggcagtgactagatgcttgtacatctcttctgtgtactagtacttttctgatttctgttcaccagggacctcaccatgagactctcatgctctcaaatcttggggaatttttttctctccagaagtctttctagggaagaaggtttctttactggcttctgagatgacaggagracactgggacctgtggttccccagcaatgcttgctctatctcagaattcctaatgaagttcctcctgaaggtccaaaggagcatcctaactcttaattcaggagctttggtgattgagcagattcttcatatctggacactcagggaggggttgttaawgcagtcagaggaccttgcactgctggtggctttagatgtggctgcacctctctgtagcaaaagaaagctgttttaactgactggtggctggtggcaagacacagaagagccaagtaaacacaggttctttatggtagaaaagactgacagcaccaacttaaataaatatcagaaaaggatgagggtttctggagtttgatataaacaacaatctgcctctgtagaaaaacttgacatgaaagtggattcttgaagcttttagagaggaagaagggggatgtttagggacttcatggagagaacaagtcatgctaaactgttctgggttggtgatgaggtttcagtgcctccggagaaatcagcaagtggtatttggttttagctagatcagggaactgagaaggtgtcggatccacaggacatgctttcttggctttggcatcctagaacattttaaarctctctgatgtcttctagtcctctaagagtctaaggaagagaaaaacaaaactttggctatactacaaatcaataggggactctttgttgctccttaatattttctttctgattctttcrtctcctgttccccatttttctaccccaaattcagctttcattatttgcttagtccctgctaatgcattctctaaagccatgtcccaaaactgtggttaagaaagacacctgccttcttccttcatcctttgtgaccaaaaagctgatctgagcacctgcctaacttcctgaaagggaggaaaatcagataggaggtttagtagagattgtctagtttcaagaaactaagtcctgggaagtggacacatgattgcatgtgcaaaaccaagaccagaacccagatgctcagaatcccaagccattgttctttgtattgtaagatgctggtttccactttgtgatgaattttgcacattgtgactccagatatctcatcaygaatctcttcctcttgagactttagttgaattagtttacacaaatatttgatctggaaactttctctcactctagcctggtactggcttgaatatgttgaacaataagtcctattatgttatgaaaaaatttgattgattcatcctcaaatcctgcatttttgtcttttctagcctaacatattatttctcttattatacttatcatcagaaaatctggaagttcagtaaccaccagaaacctgaaatagaagtcatacttcatggagaaagaggccaaaagtatttttcctctatggtgtttatttatttttttgtagaactamtttatggaggtataattgacatacaaaaagctgtatgtgtttaatatataaaccttgatgaatatagaggtgaatacatacatactcatgaaactatcacaacaacaaaagccataaacatattcatcacctcctaaagttttgacagctctatttattattattattgtgtgtatatatgtgtgtgtttgataagatcatttaacataagatctgcaatctttctttccaaattagcaggagacctgtctctgatgctgctgagccactttgacaatcgttatatagaaatctgattggatgccgtgaaactggacatcagcaaaatgtcagaatgggactttctagcatttatcctcacacagaaacatcaatttaaacaactatctatgcatgaaaataccttcagaagagctaagaaaaccaggtgaaaggttacagaaatgttgtgtagcagagaaataagaaaagattaattgaagagcataggaagaacaatttttcatttcctgtgtcacccctcccacaacaccaggcagcagggcacagagagaggcaatctctgtgtcgaagaagaaaagtgaagtgagcactgaactttgccttggactccaacgcagagcctgcttcagtaaaatccagtaatgggtatgcgactattgcccgaaactccaggctagtacctgcacactaagccagaccagatcacacagcccaggctccaggcttgyctggtggacttggtttctgggtatatcctcatgccaggtctaccccagtgccttggatgtcagacagtctttgggaccaggccagccccagtgactccaggctccagactgctcccagaacaaggccggcctcgacaactccaggtttcaagccagccccaggaccaggctagctcctgcaactctagtcaccatgccagtgtccatatatccaacccctaatctggcccctgtggatacaggctcgaggactgcctagcacaaggctagcccctgtggtcgcagactccaagtccaccctaggttccagaccggcccagaactagattggctcacaccaatccaggattcaggcccaccccatttccaggttggcagccctagccctaggccttagtcaggtatctggcaagcatctgcagacccaggctccaggcctcccgaggcctaagccagtttctgccaccccactctccaggccagttcctatggtcccatcctcyagcagacccagggtccaggcccatcacagttgactccagtattgggcaggtgcctacagacccagtayckagtactgcctctgtggacttaggttccagtccagttcctacagccctaggacccaagccaccctttgtggccctagtgtccatgcccacttctgaatatgttggttctaggacagatctcacacaaccagcctccaggccattccacaattcttggcccacccctgtggctacaagcaccagtctagcacctatggtctcaaactttagactggccccatctcaccacagccctaggccagcatcagactccaggctggtttttgtaacccagcatccaacaaactcagggcccagctgtgctctagcagacccagggtacaggccgacttcattagaccctgttgctaggctggccatcatggacaaagtctctaggaccatctctgaagactcaggctccaggtctgcccccgtctaccaagatcccaggcccatttctccagattccggctccagtcctgcaccagtaccaggccagtccccatggactcagatgccaggcttatcccagcagactcagacactatgctcattccaaaatctggccagcccctgcagacacaggctcaatgcacgcctcagagccatgttagcccctgtggacccatgctcagtccagcacctactgttaacagsctctgtacctgcccttatagaaattggctttacgttcatccccacatacccaatgaaaagatccaccccagttgatccaggcttcaggcccaactctacagacccaggaaacaggcctaccatctgctaacacaggcaccaggccagcctgcctgaggactttggcaacaagttcacctgcagaccacactagacaccctacaaagagttgctggatgactaggaaagggtttttccagataaagccggtatgcaagaactagaataagtttcttgtttttcaaatgtgcagacactaatgcactgcctaaaaatcaagatcaagaacaatcagagaaaaatgataccaccaaaggaaaaaaaaaataaccaatagctgaacctaaaaaaataatagtttatgaactgtctcataatgaatttaaaataattgtcattgaatagcttggtgagctataagacaacccagatagatgactaaaaataatcagaaaaataatacatattcataactcagaaggaaatcattgtgaagcctgaagtattggatctaatctatataaatagaggaataagcctggagggagtaaaatcaggagggacagctgggcttggatcatttagtaggtaggtacaatggaatgagctgagattataggaatagtgatttcctttttatcttgatgctctcccgtcacctcatgttttcaaatatttattgctcaaatctatctccgcagcactgacctctcatctaacctccagatattaatattttgttgcctctttgacatctactcttggatatgtcagaggcatttcactcttaaccccttcaaaaccagagtcataaaatttaattgtgcccctcttcctgtgtttctgaatctgacaatggtgtcattatccatttgactacccaagctagtatcctgtgaatacttctcaggttcttcctttacctcttatacactgtgtttttaaaaaactatgaaacatattctacattcaaaagcaatttatgacagccaatatttcatataataaacatccatgtatctctttcccaacttaaaaaatagcacactacaaatcattagaggcatacagtgtgtccctccttcatcttatctccctttctcattctcaaggacaaccactaagtctaaatttgttttaaaattagtagtgtcttacacttatttagagacatatatatgtagtaaaggtataaatagtaaacttttgttttgcttggtttgattttatataaacacatccagctgaatttgttcttctgtgatttgcactacttttttgaggttcattgtagttgatgaaattctctatccacttttacagttagagagaattcactgaagaatcaactgcttatgcacattcaggggttttctgctaaaagcagtggcaagtttttctatgaatatctttgaatatgtttcctggtgcacatatgcaggggtgtctctcaagtgtagatgtaaaagtggaaatgctcaacttcagaaatagatttgagcaataaatatttgaaaacatgaggcaatagtagaacaagaagaagaaaatgcataatctcccttattataatagatattgccctattattttacaaaatggttgtaccaccttgcacctcaaccagtgagaaatgagagttctcattattctatgtcttcatcaaagcttgaagcttggtattatccatattttaatgtttgccaattctgtgggtgtaatagggcatcttattgagggtttcaacagtagttttctaattactaatggaattgaaccctttttcctttttcatgcttcaggctctaaaatgtttatgtcttttttttttttttttttttttttgagaaggggtctcttctgtcccctaggctggagtgcagtggtgtgatctcggttcactgcaacctccacatcccgggttcaagtgattttcccacctcagcctcccaagtagctaggactacaggtgcatgccaccacgcctggctaatttttgtactgttttactagagatgggatttcaccatattggacagtctggtctggaacacctgacctcctgatttgcctgcctctgccttccaaagtgttttgcaaatttttctactggattatttttctttttagtattaattctagaagtaatttaatattgtagacataaattgcttattcatcatacgtgttaaacatgtattctgagtttcttcttgattttttattctcaggtgtcataaagaacaggagttgttcattttattgttgtcaagtttattaatctttttatgtcattacaacatctttcaaaggatgtattctgttgttttctaaaaattgcaaatgtttgcttttaccattcaagtatgtaatctggaataattttttgtatatagcttgaagtaggtatcactttctattttttgcatatagataagaaattactccagtgatgctgactgaattgttcattttttctccactgatctgtactgccaggtttgcaacataagattgttatgggttgaactgtgtcccctcataattcacatgttatagtcctaacccctagtacctcaaaatgtgaccttatcgggatatacatttcttcttgataaacttagttaaaatgtgatcacactgcagtaggatgggcccctaatccaatacccctgatatccttagaaaaggggaaaatttagacatagagacagacacagagggaagatgacgcaaagacccataggaaaaacatggccaactacaaatcaaggagagagtcctggaacagatctttccctcacagcaccaacaggttccaactctgctgacatcttgaccttggacttagaacctccagaacgatgagataatgcatttcagttgtgtaggccatatagtctgtggtacattattacccctaatagtctgtctagtctgaacttttctaacaaaatacataatgtagagccctcatgatctaatcattcaacaaagacccatctcttaatgccatcaccatggagattaggatttaaacatatgaattgtgggggatgcaaagattcacaccatagcacaaactaatacaaagatattttcttataattcgtgagtctgtctctactctctctgttctgttccaatggtatatttttctgtatattcaccaactactgtcttaattttgagatttcctactcattagtataccttgtcattgacttatgtcacatttttgtgtcttcaacaaaataattttctccataaaaggttaacaaatcatttttacatttatttctaggtaaataatatttttctaggcattataaaacaatttggggggtattacattttctgatattgttgactaagctaaatccaatgttttgtaaatatcattcttaaacctagcccgtttactactttaaactcattctaatattttatctataaatctttttagtttcaaaaataggtaatgatattatctgtggatatttcatgaatatgctttgttcccttcttttcaatcctcaaatattatcttttactaatttttcttatcacactgcattggctaaaataaattttatttaccagctaaataaaggcagtaattgtgagcactcctgtattcttcctcattgtaaaggaaatacttataacgattcattatttcacattatgttccttgtgagattttgaagttgcccttaatctgcctaagaaaccttctggtatgtttatacttatatatttgatagtaataggggcagccaagataaagtaagccctttatagcacattatttccactaattaaaactaaagactttggaaaaaaatttttttttaaagcagcatcctgagcttctactctggccaccatggaataacagagaactaatttgcactcctgcctgaaaaacctggagaaataaacaaaatattcaaaatggcttccaagacattgagcattagtcaaagaaggacagtgatccttgagaaacacaaagaaatgatccagactctaagactgccccagcttactgcctgaagagaggctctaggccatgatgcaggtgaaagaatccaggcaaagctcatttgcaactgagttgaggaaaaggaaatgagttcagggaagccaatgagtttagctttcgaagggcaggagaggactgtacagagagggtccccatgagtctttagatgagtagtgatctgcacatgcatgtgaggaaattacctaggtctgagaaaccagctaactaaaaagagtagaaggaacaatccctggaggtcttacagagctgggaatattgctgttcctgtcagacctagaaaaaaacatcataatttggggggcattgagtacaataccaaaaagaagtttggctcagcaatagggaaaaattagctctataatatacgggtgaaacattacaaaaaaagaaaactgcaggccaatataaagataaatgcaagaactaacaggtaaataccagttatgcaaggttggtttaacttttgaaaattatatcactgtaataagccaattagaataattaaaatttctatatatacatagaatcatctcaatagacatagaagaagagtttggtaaagctgatatctatttctaataagaatatcagcaacctaggaataaaagggaacttcttaaatctcatgaagaacacttatgaaaaacttagaggtaacatcatacttaatgggataggactgaatgcattcccaagactagaaaaaagtcaagaatgtctgctctggcagattctattcaccattgtgctggattgttgggattcacacaggatggtggcagaagtattaaaggaaaatattagggaaagttatagggaatagtcacaaacctttttgaaaggttgaaaggttataaagcttgtaataattgaacaggctgaaggcagccatttcttaccttagagcattaggtcatagggtaaatactagggacaacacaggcttccccagttagatctgtttaccctacctccattaagtaacctttgagacagatggccctcttgggggtagtttgaccaaggatattgccccctaatggtatttactttaaaccagggtacctgagttttaatcattcctagaactactctcttaaccatgttaattatccacaagtgtgtttactcaaatcttctgttgttaattctacactaaataaactcctagagtctgagctactcagggcaagctgcagtgacaaacctcttttggtttacaggcggtcagacactcagcatgactggcaaaacagattatctgtgtgtcagtgtacattttattcatccgtcgtttgggtcagggtctgcgggcagacacaggtagctactgccctgttgtgagaagcaatacctcaattggtgccccatgtgaggagagctgtgtgaggacagtcaggggtctgcagaaacagaccttccgcagttggagccccttgtaaggcaagctatgaaggaagtgtaaggaccgctttcatgaggaaagctgcaaaggaagcctgaggaatgcgacgggcccccaggaaacaaaggtgaagaaaaaccgcgtggtcaagtcagtgagtaactagtaagtcattggtgcccactcaaggttaccaagttctggggaaagttggttcaagctgagatttcatcatgggacaacagttattagcacagcagaaacattatataaaagtattacaacagctgcttaaggctagtggagcttcagtttcacaggctcaattaaggcacctaatcatgcatgctagacaaattgctgtaatgcaaactgttaaatcccaaagtccatggttcccagaagaaggaacgctagacatagagctccgggaaacaagtggggagagatcttaaaaacatcagttgcaaaggcagcaagtcccagtaacagctttaacgttatgggctttaactagagcagccctggctcagtcacacacggaaaagcctaaaaaggggcaggaagaggaaacattacctgccttatcacctcgtcttccctgggccctaatcaccaggcggaattaacagagaggaaaaggaggtcttacctgagcttcctccaatagataagaaaaaaggcagaggatacactacagttatcagttcccgtcttaagcaggctgaattaaaagaagatctcttagcctgcccagtaacgcaaaattggcaaagcgatcagatacctaaagggttaaaaaagggcattagaagctagagctgcattgccaagcaa

SEQ ID NO: 97401 - DNA, 14619 bp, Homo sapiens
tttgagttttgattttgccgagtttttgatatgtggacaatagttgattagcttcgaaaagtgatagaattctacatctaaagtcatctttttttttctttcttttcttttttaataaagagcttcttttattctcgtaagaatttcatgaagccttctcaccaagggtacccacaccggaatttccaggaagaaatagagtttcttaatgcaattttcccaagtaagtttaaataaaatataaacctgttgtcttcttaaagatagaaagtgcaacctcagagatctttctatatgagagcatacttatgcatatatagcattctacacacactaatacttgcttttcttgtgggttttttggtttgttttagacaggggtctcattctgtcacccatgctggtgcagtggtgtgatcacagctcactgcagcctcaacatcccaggcttaagtgatcctcccaccttagcctcccaagtagctggggctacagatgtttgccaccccacctggctaatttttttttaatttttagtaaagacaaggttttgccatattgcccaggccggtcttgaacgcctgggctcaagggatccacctgccttggcctcccaaagtgctaggattacaagtgtgagttactgcacctggtccatatttactttgacttagatgttttgggagtacagtagtgatctttatatagcttgtaattcaaaatatgcagaatttataaagaacattaaaatatcagataaaatatttttagttaagattaatagcttattgcaaattatgtatacacatgtaaaaataattgtgtatcataaatcagtgctgtttaaatgatggaattttaaaatgtagaattgatcacctgccacctctgatttttcatacagcatagagagagttcatcttcatctggccattcactctactttgtgtctcactcagtggttctttttgcgtttttgtttgagacaagtttcactttgtctcccaggctggagagcagtggcatcattatagctcactgcattgtcaaactcttgagttcaagcacccagctaatttttattttatttttagtagagatggaatcttgctgtgttgcccaggctggtcttgaactcctgccctctagcagtcctccagcctcagtggttcttaacatacagatcataatgtcctttgacaatatgaagaaggatatgattcccttcagaaaaatgcctagtgctctgctccagcattttatataataattgacctggctttttaaaattgcacagtgtaaattagtgtttcttgaatgaaattcgtaagggtttctttcatccatttactaagcttttatttatagaggtcagggaacaaaggttatctgataacatccttacttcctagataaggctgaaaacctaagataatttagtaactttgcacaaagtcgctcataagcatgaaaattgaacttagcacatctactaatatgaaaccaaaccaggctaatcagagtgttgggtatttactgcaaatacccgccaagtcagtcgatcctgcttatctgggaatttacctactgtttccattcctttcactgatgacatttcttttttcttgagatggcgtctcgctttgtcacccaggctggagtggagtggcgtgatcttggctcactgcaacctccgcctcccgggttcaagcagttctcctgcctcagcctcccaagtagctgggattataggcatgtgccaacacgcccagctactttttgtatttttagtagcgatggggtttcatcatgttggccaggctcgaactcttgacctcaagcccacctctgcctccctgccaaaaggggtgggattataggcatgagctactatgcccagtccactgatggatgacatttctaataagtggcaaatagtatcattctgcttattgtggaagggtagtaacaaaccatcctattaaatggatgtgttatatttattttgcgttctcttccctcaacagatggagcagcatattgtatgggacgtatgaattctgactgttggtatgtttaatgcaattttgtggatttttgttgtcctatgtaagatttaaactgccaattgtcatttttaggaactatttttaatttttatttaggtacttatatactctggatttcccagagagtcgggtaatcagtcagccagatcaaaccttggaaattctgatgagtgagcttgacccagcagttatggaccagttctacatgaaagatggtgttactgcaaaggatgtcactcgtgtaagcatttttagtaataattgttgctggactcttctgcgtggggactaaattttatttttcattctgtaacttttaagttcagggtaacaagtgctagtttgttacataggtaaacttgtgtcatgggggtttgtcgtacacagtatttcgtcacccaggtgttaagcctagtacccattagttatttttcctggtcctctcccttctcccaccctgggactaaattttggactcaattgaagtttatttgtcaaacccttgttaaactcggtctttttcccccccccaggagagtggaattcgtgacctgataccaggttctgtcattgatgccacaatgttcaatccttgtgggtattcgatgaatggaatgaaatcggatgtgagtagttatatattgcttcaataattatttaaatgtgaatagtctttccattcttaacactgtgaactttttctctcagggaacttattggactattcacatcactccagaaccagaattttcttatgttagctttgaaacaaacttaagtcagacctcctatgatgacctgatcaggaaagttgtagaagtcttcaagccaggaaaatttgtgaccaccttgtttgttaatcaggtaattttatattttattattaatcaggttatttgatttttaaaatcttaaaggaaatgagacagtgaggcctaagatgtattctgagatagcacatataccagccactcagatatccagaagtaatattgtttgaggttactggtagctgagaagctttgtttcattagacctgtgtcagtccttgttttctgtctagccaaactgatgggttcctcctgtcttgctattgacaggcctctggtgggaggaaccataagatgccctggcccctccagcacataagaaggcagctaaaataactcagatgtcttagtttcattaagataaaagtctgtcacttaactgttttggttgaaaatacttctctggattgcaaacactaacggttatttaattttttcccccagagttctaaatgtcgcacagtgcttgcttcgccccagaagattgaaggttttaagcgtcttgattgccagagtgctatgttcaatgattacaattttgtttttaccagttttgctaagaagcagcaacaacagcagagttgattaagaaaaatgaagaaaaaacgcaaaaagagaacacatgtagaaggtggtggatgctttctagatgtcgatgctgggggcagtgctttccataaccaccactgtgtagttgcagaaagccctagatgtaatgatagtgtaatcattttgaattgtatgcattattatatcaaggagttagatatcttgcatgaatgctctcttctgtgtttaggtattctctgccactcttgctgtgaaattgaagtgcatgtagaaaaaaccttttactatatgaaactttacaacacttgtgaaagcaactcaatttggtttatgcacagtgtaatatttctccaagtatcatccaaaattccccacagacaaggctttcgtcctcattaggtgttggcctcagcctaaccctctaggactgttctattaaattgctgccagaattttacatccagttacctccactttctagaacatattctttactaatgttattgaaaccaatttctacttcatactgatgtttttggaaacagcaattaaagtttttcttccatgagttgagtccttaagaaaatgattccagttactcattttgcatatttgctattttaacattattggaccctgcatttatagtcctttgatttcttccctctccctggtgtctcccccaagaccccaaataaagcaatacactgttaacactgtgggtttatatactaattctataccccagatggggaatgggggagatggtccctgggcttaatattctttaaagggcatgggaatttagcctctcttttattgtaatgtgctcttttggaaaatagttggttagcagggaagacccagagttgtagattgagattagggtgtactggctgaactgtggaaaacatacaattctgtgttcctcagtaaatgagattagcgtctaatgagtagcacccctttactaacttagtagtagtataaaatcatttttatttagttaattaccagagagatttagcataattttgttctggattcagtaaatcaagtcagcttggatcattcaccttaacttttcctttagcagccatttccactagtttccattaagtagtgttctataaactttgatccaaagcagaatcaatgtcttttccatctcgtgacttaaagttctgtgactgtgatgcatgtgagtgttccgacttcatctgttcctcttaactacggtgtttcccttaccatggcattcataggatgaaatgaatgactgcccagaatgagaatttgtccagattattcagataaacatcataaagcagaatacattataaataagtagaatatgaataaatagaataataaaattccaaaatactcaatgggaaatgactagtaatataggctttcaagagttggtaccttttagctatatttgcagattctctgggattttaaggaactgagaaaacagcaaagttgactaaattttatatttcttgtcctctaaatattttgataatttctggattgatgcagtgatgtttttgttccttccgtatttataaatgaaacacctttttttagtgtttctaaacctaaaatctacttggtttgaaatcaagtggttggaacactgtttgacttttatttgaagcatgttgttgattgaaaatttcattgaggaagttttcaatcagtgtgatcagtttgattctgtaatgagcacagcacctaatattttgaggagctctgttttgaggaccaatgcttaaggtggactttgttcgtaaacaatatcccaatagatttgttgacttgaggtctggtttggttttgtttttgttttgttttgttttgttttgtttccaatagaattaagaattctaatgttgaaaaactgcacaaatttttatgggacaaagcctagaaaagagaaatgtagtttgaatcataatctaaatcatcgtatgatagaagagggaaagttttggtgccataatttctcctttcactggtgttggacttaaatcagttgaaatgtatttctgtaccacaatttacgcttcaataaaagtttaattgtctagtgacattcagaaacttttctgttgccctgttttttaagtagcctacttgaccaaatactacatgtctgaagtttaaaatcaatacaacaatgtgtatttatgagtttggagttagacagaagtttaaaagtgttaggtcccaacctttattatagactagactcttaaaacattggttgaggatgatcaaactcaaataagtttccttatttcattcatggttatttctattaagtagaaaaaaatttataaccttgatcattttctttattttttttaatttaggatcttgttctgttgtctaggctggagtgccgtggctgttaacaggtgcgatcatagcatactgcttccttgaactcctaggctcaagcagtcttgctgcagcttcccaagtagctgggaatgcagggttctgccatcacacttggctttgtcattttctttatttggcaacattttagttccacagtcaaatatgtaataagctgaaaaatcttatgaaaatgtatattctgatctttctcagaatatgcttccgttagaaaatatttcctcaattttcattaaaaacagatggtgttcctagaaaagcaaaatattacatatctgtgcaatatgtaattcacaagattcatttgccaaaaacaggtgagtgaatttgggggttcattagtaagcagtcaccaagtttctgtcacagacacataactggaaatgtgattttattctcctggatggacaattgtgatggattttttgggttccgggcttcaggctttgcaatctcatcttctttgcccttcctcttgtcataatggaagaggtgctgctaatttgggttccatcctttcctgctttcagagactgtcctgtgatttcctaaaacatttccattagtttgtttgaattttctgattttcttcccttagggccctccacaggcctctgtgctagtgccttgaatgatggcaagtgtacaaaaaaaattttttttctttttaagacgtttttgttctgtcacccaggctggagtgcaatggcgtgatctcggctcactgcaacctccacctcccaggttcaagtgattctcatgcctcagtcacccaagtaactgggactacagggatgtgccaccacacccggctaatttttgtatttttagtagagacaaagtttcaccatgttggccaggctggtcttgaacttctgtcctcaagcaatacgcccacctttgcctcccagcatgttggaattacaggcatgagccactgcacctggtcaagtgtccaaattcttactccaaaactgaactttgggctgggcgccatggctcacacctgtaatctcaaaagtttgggagtctgaggtgggaggattgcttgagcctaggagtttgaggccagtctgagcaacatagtgagaccctgtctctacaataaataaaaggaaattgaggctgtaatgagctgtgattgtaccactgtactctagcccgagcaaaagtgaaaccctgtctcaaaaacaaaaatcttgacttgtgcaatagccacagttttcctggattctcaatagaaccctatggtgacatttgaaacacaaagctagaggtatgtgacttcaagatggtaagaaaaccatgaaacagacttgtcaagggatgtctgataaattgttggatatctggcctaggggcccagacaatagattttagatttgtaaacatcttaatatggagggttttgtgtgtgtgtgtatgtttgagacggagtctcgctgtgtcaccaggctggagtgcagaggcgccatcttggctcactgtaacctctacctcctgggttcaagtgattctcctgcgtcaacctcctaagtagctgggataacaggcacgcaccaccacgcctggatgattttttgtaattttagtaaagatggggtttcatcatgttggccaggctagtctggaactcctgacctcagatgatccgcccacctcggcctcccacagtgtagggattacaggcatgagtcactgcgcccagttttaacatggagaattttcaaacttacaaagtaaacaaaatggtacactaaacctttatatacagtttcaacaacaccattctagttaggcatatctgtctactaactacatgccctttttagataaaatttatttaaattgaaatatgtaaatccagctgggcacagtggctcacgcctgtgatcccagcactttgggaggccaaggtgggtggattacctgaggtcaggagttcaagaccagcctggccaacatggtgaaaccctgtctctgctaaaaatacaaaaattagttgggagtggtggcgcatgcctgtagtcccagctactcagaaggctgaggcagaagaatcacttgaacccgggaggctgaggttgcgstgagtcgagattgccactgcactccagcttaggcgacagagtgagacttcatctcaaaaaaaaaaaaaaaaaagakatatatatatatatatacacacacacatctaagttataattttggtaagtggttctcctttgcccacaccttaccaggacaaaaggagcttactctacccaggcaattaagcaatctcccaccaccaccaagctcaaatgttttcatcatagactagggttcatttttatttccttccctggagctttgtaattctttcagcgtaaacattgttgaggttcaacagtccttattgctgagtaggactcgattgtatgaatatactataatttgttaatctgttttcctgttagtgaacattttattggtttctagtttttggcaagtgtgagtaaagctgctatgaacatttgcacacaaatattgtgacttctgggcatgtagtggtatcttgtggtttcagtctgcatttctctgactaatgaacacgttctcgtgtttattggccattaatatgtctttgagtgtgtatttttaaattaggttcgtttttattaccaagttataggaactctatgtattttgaataaaattccttgtcagttattttgcaaatattttccccattgtgtgtcttgactcttgattttttttatagtgttttgagcagaagtttccactggagtcttaatttatcaatttttaaatggactttttctaaataaatctgcctacctccagattgttatggtggtattgttttctcataaaatgtttaagcttttatgtttttaggtctattatcaatctcaagtaagtttttgtagtgatgtagggtagggcttgaggttcatttttctccccccgtcaagttattctaacactgtgggaaggattcttttctccatctatttctggagtatattctcgcttttttttttttttttttttttttttgagacagaatcttgctctgttgcccaggctggagtgcagtgatgcgatcttggctcactgcaacttctgcctgccaggttcaagcaatcctgcctcagcctcccaagtagctggggctacgggcgtacgccaccatgcccgactaatttttgtatttttattagagacggagtttggccatgatggccaggctggtcttgaacttttggcctcatgtgatccgcttacctcagcttctcaaagtgctgggattacaggcgagagccactttgggtgtgtccagaaggcacctggccttctggagtgtattctttttcattgatccacttttatctgtccatgtgcccatacaatactgattgctgagctttaaagtcttgaagtcaagtggtctacttttgttaacgtttgtagattactttgtcctttagacgctgatataaatacgacaataaacctgtcagtttcaattttttttaaaagcctgatgggattatttaagttgaattgttttgttctgttttgttttgttatatacagttttgctcttgtggcccaggctggagcacaaaggcgcgatctcggctcactgcaacctccaattccccgggttcaagcgattctcctgcctcagcttcccaaatagctgggattacaggcatctgccgccatgcccggctaattttttttatttttagtagagatgaggtttcaccatgttggccaggctggtcttgaactgacaggtgatccacccaactcggcctcccaaagtgctgggattacaagtgtgagcccccgtgcccggctagttttttgttaattcctgagcatttttggtttctggatgctagtctaaatggaattggtttctttttccaactggtactagtttatagaaaggcaactttaaaaatgttgacttatgagactttgccaatagtgggtggttggttggttcctcccttattccactggttaggacttccatggtgagaagaggtaagagcagactgtgactaaagtgaggtatgtaataaaatgtaaggaggcaccgtcagggcagtggaagcgtagagtgggcatctgagtgggagtacatccttgtacttgctccctcccttgcacttgtaccttacttgcttggtctcatgtgctgttcctgtattaagggcttacctccttgccctgttcccagtttgaggaagaaagcattgaatattccatcaagagtgtttgctagtaggtgtttttgttttgctttgtggagacagtgtcttgctgtgtcacccaggctcaagtgcagtggtgcattcacggctcactgcagcctcaacctctcaagttcaagtgatctcatctaagcatcccgagtagctgggactataggcgcacaccaccacacctggctaatttttgtgttttagtagagacagggttttgccatattgcccaggctggtccccacctcctgggctcaagtcttagcctcccaaggtgctaggattacaggagtgagccacctcacctggcctctactggttttatgtagatgtctagatcaatgccttttattagattgagatagttcccttctagttagctgggttcttatgaatggaagatatcacatccctacccccctccttttttcccctccattgagataatcatggtttgtatgcttttttagatactgtttctgtcctcagaatgaaaggagttaagtagtggaacgtgatgactgaaacaggccctctaccattggagacaagaagggaagtgtatggagtagccattcttttattcgtttactttcttaacaaacttgctttcacttaaaaaaaaaagtgtaaaggcacctgggtagttctctggtttaaagtaactttgtggccaggtgtggtggctcaagcctataatcccagcactttgggaggctgaggtgggcggatcacgaggtcagaagttcaagatcagcctggccaacatggtgaaacccccatctctactaaaaatacaaatttagccaggcatggtggcaggggcctgtagtcccagctactcaggaggctgaggcaggaggatcgcttgaacccgggagccagaggttgccgttagccgagatcatgccactgcactccagcctgggcaacagagggagactccgtcttaaaaaataaaagtaactgcccaaggttagagaaactagaaatgatagagcccagattcaaactctggcaggctagagcttgttgtttcagtcactgttatctctcagctaaatcttttaatctccttaaagcttcggaattcaatgatttcatctcctattttatttaccgtttaagaattcctcatctttggtagcatgtttggttctgttgacttcagcctcacctttagcattttattttatttgtttatttaaagacagactgttgctctgtcactcaggctggaatgcagtagtgcgatcttggctcactgcagcctccgtctcctgggttcaagtgattctcctgcctcagcctcccgaatagctgggattacaggcccctgccaccatgcctggttaatttttgtaattttagtagagacggggtttcaccatattggcctggctggtctcgagctcctggcctcaagtgatctgcctgcctcagactcccaaagtgctgggttatcagatgtgagccaccgtgcccggccacctttagcattttagatgtaagagatactcctcgtattttaattcctgtgtttatctcactgcaaactgatatagtctgtgcgtggtggctcatgcctgtaatcccaacactttgggaggcagagacaggcggatcacttgaggtcaggagttggagaccagcctgaccaacatggtgaaactccatctctactaaaagtacaaaaaaaaccccaagcttggtgatgtgcacctgtaatcccagctactcaggaggctgagacaggagaatcgcctgaacctgggagacggaggttgcagtgagccgcgatcgcaccactgcactccagcatgggtgacagagtgagactccacctcaaaacaaacaaactgatatagtttgggactgctaccagtcaacagaccacaattggtggtagagtgtagaagccgggacatgggagaaggggagacatgacgatacgggtcacacaatcagctgcaggccaagtcaccctgatgaaacaggaatccaaatggcatctggggccagaggcttcccccacgacacagctcacttattcaaagttgttcaaaagaattgactgccagtactgcctccttaggaggtgaactctctgctaaggcagaataatactgtgtaatttttagaagtatgtattagacataaaatatgttaaaatgcatgtgaaataaagtacaattcacagcagaacaaagttttagtttcttagggctgaaatgtagatcatcctatttgaaatcattactgttaactatattagggcaagactcctcaaggacatagaaactaattgaagcagttgattcacaatttgacctttcttgcagtaggcacttaggttgataaatccctaatctaataactaactgttctatgctctggaaagaaatttggtaaattcccgcttaccaaaatgccctatgttaacattgtgaattctttcacaaatactgtattgtgaaatgggagtacatatttgtgatgtgctgtttattatgtggacataatataggaaattatcaagagttgtcagtaaacaaaaggaagcatcctttccattcaaaagagagtaattcagtggactagagactttaaaatttctttgtttttagaggtggggcctctgtgttgcctaggctggtgtccaactcctggaccccagcaatcctcttgctttggcctcccaaagctctgggattacaggagctagctgccacgcctggcctagacttctgtttttacgtagtagaggcaatttatgaagataaagtcccagctgtaaaagtgtggtgttaaaattaaattacttcacattttttcttttttaaaaatattggtgcacacttcacctggacttcattttttttcaaagtatacttgtgagttatcttaatggtattccttagttatttgtaactatgtagtgttgtctgaaggtttcactatgcttttcctgcctcaaaacatcctccccaccttcggctgccttgtctcctcgtgtccctgacctgcttcctccttgctcagtcctctccaggaactctggcttcttgctcttcctagagcacaccacgcatgattctgtgttaggatttctgtgctagctgtattctggaatgttcttcctttagacatctacatagctcactccctcaccagtctgtctttgctcaaagtcttactgagacataccataccctgaccatcatattttatattgcaaactgacccccaaacagtcctaatccccctcatctctattagtgtgttttagatactaagtattcatcatgcttacttttattgtccagctccctctactagaatgtaagctttctgaggacagggatttatatctgttttgtttctatttcccaagcattgaggtccaagatagccctagtaatgaccacatactgtgctgtgttcacaaccttctgtagtctcttcccacactgatagggctgacttatgtggccagtaggttgttgcagaaataagagagtatgattccaaagataggtcataaaaggcatctaaggaataggtcctctagacccagtcaagctttaaattactgtagatctctccaacatctttgtatttttcatgcagtcttttttccccattatctttaatttttctttcctgagagccattataggtttacagcaaaactgagcagaaggtacagagatttcctatacattgtcttccccacacatgcataacctccttcattatcaacatcccccaccagagtggcacgtttgttacaattgataagcccacattccattaccaagggtctgtagttgacattagagttcgctcttactgttgcacatttgatgggtttagacaaatgtataatatcatgtattcaccattatattatcatgcagagtatttttactgcacagaaaatccactgtgttccttctattcatccctccctcctcctcagaattatttgtaagactccaaaaacacagaacagaggggaggttccaagatggctgaataggaacagctccagtctgcagctcctagtgtaagcgacgcagaaaacgggtgatttctggatttccaactgaggtaccaggttcatctcactggagcttgtcagacagtgggtgcagcccatggagcagggtggggcatcatctcacccggaaagcacaaggagtcagggaattccctttcctagcaaaaggaagccatgacagacagtacctggaaaatcaggacactcccaccctaatactgcgcttttccaacggtcttagcaaacggcacaccaggagattatatcccgcgcctgctttggaggatctcactccctcggagctgtgctcactgctagcacagcagtctgagattgaactgcaaggcaacagcgaggctgggggagca

SEQ ID NO: 97402 - DNA, 14779 bp, Homo sapiens
agccgctccccgaccttggttcccgatttgtggcctctaacactagggttcattgaggagcccggtccaggttctgagggcttttaaagaggaagccggggtcatgaccacctacgctaattttcccaggggtaaaatcaaggattgtgttggggacgagggtaaggttggttgcgtgaaatcgagagcttttcgacggggtctgagtcacggacgatcccctctccacaaggaactcctgaaaccaccccctccgagcttctcacgtaggggcccgaattcctttatagatattccttggggttttcctcggccccacccagaaactcaactctgtctgattggactgcaacaaagggaggtcccgcccatcgctccatgacgtcacagaggctgcagcctttttggactagaattttcccagcatctagggaagaggaagcctcctgactactctggcttccagagtcaaggaccggactcaggccttcagtttcctcccctccccttgccccaggacccaggctttgggctagatccggccccccaggccgctgccgcccccaccgcggtccttggaaacggctgtcgagccacgaagtggacattttagccctaagactacaactcccaaaatgccctggggcctctttctctgtagctgactgacgctgccaacctcatagctttccgggaaatgtagttcagtgataatccgctccctcctccgcctcttctgcccacgcggaggtcccagtgggaggagaggactgggggccaatactgacagtccaggagtgagcaactgggggctcagacgttagggtcctggaaggtctctctctcctgtgtgatagaaacagggaaccagaaaaacagggaccacaactcacacaagtccagcaacaaggggctgtcagatctaagtagggacagtactcccaatcacgagtaataaaaatcctcagggcccggcgcggtggctcacgcttgtaattccagcgctttgggaggccgaggcgggcagattgtctgaggtcaggagttcgaggccagcctggctaacatggtgaaaccccgtctctactaaaaatacaaaaattagctgggcatggtggcgaacgtctgtagtcccagctacttgggaggctgaggcaccagaatccgagaggtgggagtttgcagtgggccgagatcacactactgcactccagcctgggccacagagcaagactcgatctctgaaaaaaaataaattaattaaaaaaaaataaaagtcttcagaagtaccccaccttttcctccactctcttacacacacacacacacacacacacacacaaacccacacacacatacacagtggctctggctccaaaaaagctacagagacacgggttagtgctgtagacttttaattcatacctcctgctctctcacccgtggcagctgagttgggaacagtactgtaacaattgtaactgtaactccctgataagcctacaggcatggggtctggatgagtagacaggggatgtgatcagagctgactatgtttaaggtttcttctttcaccctccaaaaaacagcaaggggctcctgagatctcgacaaccccgtccaccttggccagacctcgtgctcctgcctggatctgaggctgggtccagggtctgcctacctttagatcgttttatctcagacctgcccaaagccagatgtagtggttctgggagttcagggacagacagtggttagcaatgagcacggtacctgccagtttgtcacaagcacagagggtgtgtttatacctgcacacttccagaaaacagatcccagaccctcagcagcccacctgcagacaaagaccaacttccttcattgtgagaggcaacctgaactcacacccaatatatggagctcttggcagtttatgagctttaaaaaaaagtgtccctggatccctggaaagttctgctccagaagctgtaccattttggcagtgatccctcaccccacgttcacattttagcctgtctgctcaaaacaaacaaaaaaaagtctttgaggggctgtggggcttgttggacagagtcccgctctgctcaccaactaccccagcttttccagagactgtgaacagagcaagacgctggccaactagagatggtttgttttccatctcaatttttccagcaatggtggaacattcattagatgctacaattaggttgcacattcattagattcttcacttggcccggtgtgctggctcacatctataaacccagcattctgggaggccaaggtgggaggactgcttgagcccaggagttgaagaacagcctgggcaatatcacaagacctcgtctctacaaaaattaaaaaaaattatccgggccaggcatggtggctcacgccggtaatcccagcactgtgggaggccgaggtgggcagatcacgaggtcaggagatcgagaccatcctggttaacacgatgaaaccccgtctctactaaaaatacaaaaaaaattagccgggcgtggtggcgggcgcctgtagtcccagctactcaggaggctgaggcagaatggcatgaacccgggaggcagagcttgcagtgagctgagatcgcgccactgcactctggcctgggctacagagcaagactccgtctcaataaataaataaataaataaataattaaaaaaaaaatatccgggctgggcacagtggctcatgccagtaatcccagcactttgggaggccaagacaggtggatgacaaggtcaggagatcgagaccatcctggccaacatggtgaaaccctgtctctactaaaaatacaaaaattagccaggcataatggcctgtgcctgtagtcccatctactcaggaggctgagacaggagaatcgcttgaacacaggaggcggaagttgcagtgagccaagatcacgccactgcactccagcctgggcaacagagcgagaccctgtctccaaaaaaaaaaaaaaaaaactaaaaagattcttcaccttagttatctggatttccagaaccccatcctgtccataagggccctgcagggttcttcacaggcatcaaacctggtcctctctagaacaagtctccctctagaatcactccagaaacacagaaggggacttggtgaatgcttgctctggagcaatcatatgctccttcagtctttggaggacccaggggagaagtaacccctcttctagagtagaccagagggagagttccccattcctgggggcagccatctggaagtactgtagatatgggctgggaagagcaggtgggcactgtggcttctagaactgcctgccagccatcaggaaaagatgttttgctagttctagaatattcagacagttccagaaacgtcccccttctctccaactctcccaactagaatcactctggatacgggcacccatttgcttcaggaacaccacaagcttctccagaagatgccaggcctctgaagccacgtactgctggctctagaaagatcaggctacttcagaaagtctccctggctctcaaggcttagccaatgtccagagtggagacaagtctgcattaatgcccacccactcgggcaggaaggccgcctccggcttaaagatcttcaggaactcagagtctggcagggtgaagttggccaggtagacagtgtctccgccagccaggtaggcagcccagaagccgaaggtgccaatggtcataatggtgtggttgcactgtgtgagcagggcaaagtctttccacggtgtagcctcctgtccatcgccagcaaacgtcacatcgccctgggaggtgtcgatgttttctttacaccactccatgccgttgctggtgaccacgaaaacgggggcttcgtgccgtgcccggaaccagtccatggcctgccggaggtaggcgctgtcgcccaccacacccttccagcgctgaggcataacctgcagatagtccccacggcgcacgtggacgccgacaaaggtgcgcgggcggtcccctgtgcggcccaggcggagctgacccagcacactctgcgcctcttcccgaaggtggtcgtgcagggtgaactctctgcggatctgttcccggagatggtggaagaaagtccaagagcaggggaagccagagagcttcaggaaaggatctctcaagtccgcgtactcctccgacatccagtcgtgaagctgcagctcccgccacggcgtgcggctgtccacttctggggccagcacgggcagggtgatgcggaataccggggccagggcggcatgcatggcaggcaggataaaggcccggcggccgttgagctgggccagagccagcagcgtggcatactgtcccatctgattaccaaaccggccattggggtagacagtccaggtgccggagagggaagcagggtgctggggacaggaagaggaggcgttggggcccatcgcagtacccggcaggcagaagatggccactgggggtgtcaccaggcggcggtctggacacaggatcgacaggcctaggccatgtggaaagctgtcttgatggatatggaggaagaagattacagagaggacacagactagcaggaaggccaggcagagctgacgatggctccggagccacatggctgcaggggaggaaaggcgaattagcaaatgcactgaggctgaggaggggaggctgaggagggatgtggggtaagggaggcgcctggggtgcagcactccttagtcccagggaaagaggaagttaaaggtttagactcctggggctgaggtagggagagcctgagtcctaggtttcagggatgagagccttggaatttcggggcatggggactggaagacaagtggttttcaagatagccatggtttggctgggcactgtggctcacacctgtaatcccagcatattgggaggctgagatgggaggatcccttgagcccaggagttcaagatcagcctgggcaacagagcactcttacaaaaaaattttaaaattagcttggcatgggccaggcgcggtggctcacacctgtaaccccagcactttgggaggccaaggtgggtggatcacctgaggttgggagttcgagaccagcctgaccaacgtggagaaaccctgtctctacttaaaatacaaaattagccgggcatggtggcgcatgcctgtaatcccagccactcgggaggctgaggcaggagaatcgcctgaacccggggggcgggagttgcggtgagctgagatcatgccattacactccagcctgggcaacaagagtgaaactccgtctccaaaaaaaaataaataaaattagcttggcatggtggcacatgtctgtggtctcagctacaccggatgctaaggcgggaggatccccggagctcacaatgagccgcgatagcaccgctgactgcactccagcttgcgcgacagagagggaccctgtcttaaaaaaaaaaaaaaaaaaaaaaaaagaaagtggtccaggttcctacacctttcctgaaggaatctcgagtctcccctcctgtaagttccgctgatactggactcttccaccagcctgtttctcaggagtacctgtctgtgaggcgcaaaatccaccacagaggtggtgatgggaaacgatagttcaagtaaaacaagagaggctggagggtcaggagcggaaggagcatcttggttcctggaggagtaatggctggggaggtggcggagattcctagggccttaggaagacctggagaagaggttgggggtgcacctcctggttctgaaggagttgttcctgggtcccaggaacaactgagtggggcagtccccacttacccgagctgcttgcaggtggcagatccacagtccgcttttcgtggccggagcgcaccctccgcaaaggcaggccacatccggccgcccctggaacgccaggcgtccggctatccggcccggcagccctcccctccgcgcagcctgtccggactggcagcgagggcttggggaggagaggaaggagagggcgcggccgggagtctcgcagcgtccgccctcccgggccgggcggatggctggaaggtggagccccgcccgtcacttggcgccgagccccagcgccaggggctaaggcgatggcccctgggcccaccgctccccagatcggggatgcaggggaccgcgccctgcccctccgccccgtcattgacctgcgcgaaggcttcacccagggcaggctacctggcttctgagcagccgcagcatcattgcgtggaccaggagacggagcgcccagttgcaatgctggagccgggaggtccaatccgccgccctctctcttccggtgccagggcttagagtcggcccccgacacctgggtgcttcgagcctggccacgccccagcggctgggcagggcccccgcacctggtcccggcgagtggagcgatcgtccgccctctgccgcgtcctcctgggggayggagaacctgtttgccaggctgccgccggagcgcgcgagggcctccagcctgcaggtgctcccgcgcccaccagsgtctccgatctcccacaccccccgcctcaccgtccacactcaaattccagaatcccagcccctagtcactccttttggggaattctagggtcccgtgccaaactgctactttccagacctgcactgcacgaaggcaaccattccaaggctggagaccggagtggaacagggtctgtttcccacgccgtcagcgggggccgtggctgccggcgccagagacaaaggcctctgcccgcttgtcacctaattaaagcattttctctggtccaaggcccacctccagcatcgccaaccccgagcagggcaggctaacgtagggtccagccctacggggctttgcgggtgggtgttcttcccctgtgaggagaggagagattgtaagaaataaagacacaagacaaagagataaagagaaaacagctgggcccgggggaccactaccatcaagacgcagagaccggtagtggccccgaatggctgggcgcgctgatatttattgtatacaagacaagggggggcaggataaggagggtgagtcgtccaaatgactgataaggtcaagcaagtcacgtgatcatgggacagggggcccttcccttttaggcagccgaagcagaaagagaaggcagcatatgtcagcgttttcttctctgcacttataagaaagatcaaagactttaagactttcactatttcgggcgggcgcggtggctcacgcctgtaatcccagcactttgggaggctgaggcgggcggatcacaaggtcaggaggtggaggccatcctggctaacacggtgaaaccctgtctctactaaaaatacaaaaaattatccgggcgcgtggtggagggcgcctgtagtcctagctatttgggagggtgaggcaggagaatggtgtgaacccaggaggcggagattgcagtgagccgagatcacgccactgcactccagcctgggggacagagcgagactccgcctcaaaaaaaaaaaaaaaaaggctttcactatttcttctaccgctatctactacgaacttcaaagaggaaccaggagtacgggaggaaaatgcaagaggacaaggagcgtgaccattgaagcacagcacagcaggatgactgcgggcaggcctagataatacccagcctcccacaagaagctggtggagcagagtgttccctgactcctccaagaaaaggagattccctttcgtggtctgctgagtaacgggtgccttcccagacactggcgttcccgcttgaccaaggagccctcaagmggcccttatgccggtgtgacagaaggctcacctcttgccttctaggtcacttctcacaatgtcccttcagtacctgaccctatacccaccggttgtttcctggttatattagttatacaacaaagaataaaagtaatagctaatgattaataatgtttacactaatgattgatactgtccatgatcatctctatatctaatttgtatgataactattcttattctaactattttctttattatactgaaacagtttgtgccttcagtctcttgcctcggcacctgggtaatccttccccacagactgaccctcccattcaagatacatcaatgtcaaagactcaggagtttgacttgattcccagaagtttaaccatcatctccccaggctcgggactcccagcacccagacccttctgctcacacccagcagtccaggcccccagaccctcctccctcagacttaggagtccaggctcccggcccctccttcctcagacccaggagtccaagccccctgcccctccttcctcagacccaggagtccaggaccccagcccctccttcctcacacccacgagtccagatccctagcccctactccctcagacccaggagtccagaccaaagctccctcctccctcagacccaggagcccaagttccccagcccctcctccctcagatccaggagtacaggcccagmccctcctccctcagayccaggagtmcaggccccccacccctcctccctcagacccaggagtccagagccccagccctcctccctcagacacagaaggcctacccttgcacccttaggggctccaggaaattagccaacctgtcttccctctgggtgcccactccagggcctggcttggctgccaactccagtcagggactttcagccacccctccccccaggttatttcaggagcacctgcctgggcctgggatggcttctctggtgaaagaaacaccaggattgcatcagggaggaggaggctgggatgtccagggtctgagcatctgagcagggacagatgaggttgaggttggcccacggccaggtgagaggcttccaaggcaggatacttgtgtctcagatgcggtcgcttctttcatacagcaattgccgccttgctgaggatcaaggaacctcagtgtcagatcacgccctccccccaaacttagaaattcagatggggcgcagaaatttctcttgttctgcgtgatctgcatagatggtccaagaggtggtttttccaggagcccagcacccctcctccctccgactcaggtgcttgagaccccagatccttctctctgagactcaggaatgtgggcccccagcccctttcacctgggtcccagctaacccgatcctcccctccctcatcccctagacccaggagtctggccctccattgaaaggaccccaggttacatcatccattcaggctgcccttgccacgatggaattctgtagctcctgccaaatgggtcaaatatcatggttcaggcgcagggagggtgattgggcgggcctgtctgggtataaattctggagcttctgcatctatcccaaaaaacaagggtgttctgtcagctgaggatccagccgaaagaggagccaggcactcaggccacctgagtctactcacctggacaactggaatctggcaccaattctaaaccactcagcttctccgagctcacaccccggagatcacctgaggacccgagccattgatggactcggacgagaccgggttcgagcactcaggactgtgggtttctgtgctggctggtcttctgctgggagcctgccaggcacaccccatccctgactccagtcctctcctgcaattcgggggccaagtccggcagcggtacctctacacagatgatgcccagcagacagaagcccacctggagatcagggaggatgggacggtggggggcgctgctgaccagagccccgaaagtgagtgtgggccagagcctgggtctgagggaggaggggctgtgggtctggattcctgggtctgagggaggaggggctgggggccttggcccctgggtctgagggaggaggggctggggatctggactcctgggtctgagggaggaggggctggggatctgggcccctgggtctgagggaggaggggctgggtctggacccctgggtctgagggaggaggggctgggggtctggactcttgggtttgaaggaggaagggctggggtcctggactcttgggtctgagttgggagggggctttggcttgggcttctcctgggtctgagggaggaggtaggctgtgggcttggactcccagggctgggacagagccggatggtgggacagagtcgggtggtgggacagtcccgggtgggagaggtcctcgaaccaccttatcgctttcaccccttaggtctcctgcagctgaaagccttgaagccgggagttattcaaatcttgggagtcaagacatccaggttcctgtgccagcggccagatggggccctgtatggatcggtgagtttccaggaccctcctcaccacccaccatgctcctcctatatgtcgccctcacagcctggggtgccttgtcttgctcatcccccccggagccagacttgattctatttgctctgcacgcccccagctgcaacatttggaggttgaagttgtcatcagtgtttgcaagatgaggaaactgaggcccaggccggggcgccagtgacctcaatcatgtgatgtgtggatgctggagcggcctgaggctcaggttattgggagtctcgtgattcagtaacccctgctcctgcccacacggcccctgtgtgcacggctcatgctgggcacagggacactcggggaagccatggccagtaaagtgaccaggaccttgagtgctagggagaccccccgcctggcctgagagagcactgatggctccgagggctggaatgttctctgtgaagtctgaactgggaggcaggtccctgcaggagagccctggggtaaaaaacaaaacctgccttgctgttttgtttcctagaggaggggctgggggcctggactcctgggtctgagggaggaggggctgggggcctggacccctgggtctgagggaggaggggctggggcctggaaccccgggtctgagggaggagaggctggggcctggaaccccgggtctgagggaggaggcgctgggggcctggactcctgggtcggatggaggagagactagggtctggacccctgggtctgagggaggaggcgctgggggcctggacccctgggtctgagggaggcagggctggggcctggatcctgggtcttacatcaggaaaacagaggaaccctgtctctgatcctgtttttgtcccctagctccactttgaccctgaggcctgcagcttccgggagctgcttcttgaggacggatacaatgtttaccagtccgaagcccacggcctcccgctgcacctgccagggaacaagtccccacaccgggaccctgcaccccgaggaccagctcgcttcctgccactaccaggcctgccccccgcacccccggagccacccggaatcctggccccccagccccccgatgtgggctcctcggaccctctgagcatggtgggaccttcccagggccgaagccccagctacgcttcctgaagccagaggctgtttactatgacatctcctctttatttattaggttatttatcttatttatttttttatttttcttacttgagataataaagagttccagaggaggataagaatgagcatgtgtgagtgtctgagggaagacatggcagctgttttgtcttccttggcccggacaaccccctctacacctcccctcacgtggtccgagggtcctggcttcccactgggcctcacttttttcttttcttttcttttttttttttgagacggagtctcgctctgtgacccaggctggagtgcagtggcgcgatcttggctcactccaacctccgcctcccaggttcaagcaattctcctgcctcagccacccgagtagctgtgattacaggcgtgcgccaccacacccagctaattttgtaattttagtagagacagggtttcgccatgttggccaggatgctctccatctcttgacttcatgacctgcctgccttggcctcccaaagtgctgggattacaggcttgagtcactgtgcccagcccagcctcacttttctactctgctaaagtgtccccagggactgtggactatccctgctctctgaaaggacaagactggccgggagtggtggctcacgcctgtaatcccagcactttgggagacccaggcgggcaaatcacctgaggtcaggagttcgagaccagcctggccaacatggtgaaaccccatctctaccaaaaatacaaaaattagccaggtgtggtagcacatgcctgtaatcccagctacttgggaggctgaggcaggagaatcgcttgaatcccggaggtggaggttgcagtgagctgagatcgagccattgcactccagcctgggcgacagagcaagactcaaaaagtctcaaaataaataaataagtaaacaaataaataaaataagaccaggcaccatggcttacgcctgtaatcccagcactttgggaagctgaggcaggtggattgcctgaggtcaggagttagagcagcctggccaacacagtgaaaccccatctctactaaaaatacaaaaactagccagacgtggtggcgggcgtctgttgtcccagctactcggggggggggctgaggcagaagaatcacttgaacctgggaggtggaggttgcagggagccgagatcgtgccactgtcctccagcctgagtagtacagcaagactctgtctcaaaaaaataataagttaatttaaaaaatacaaatagccaggcgcggtggctcacgcctgtaaacccagcactttgggaggccgaggcaggtggatcacgaggtcaggagattgagactatcctggctaatacgatgaaaccccgtctctactaaaaatacaaaaacaaaattagctgggcgtggtggcgggcgcctgtagtcccagctactccggaggctgaggcagaatggcgtgaatgcgggaggcggagcttgcagtgagccgagatcgcgccactgcactccagcccaggccacagagcgagattccatctcaaaaaaataaataaataaataaataaatataaaaataaaatgaaagagcaggacttctttctacaacccctcaacttgtgtgagcgttgtgtaactatttcatagagctacctcaataacaggggagcttttacgaggtgacacagcacactcacatcctcatgggagatgtagttttctggcatcatttagcagcaggaatgagatctgttgggcctcaaatctgggacaaggactcctgggtcctggagtaggtttggggctagtgtaacacccaagttctggggaatcagtgggctggacatctggacacctggatcacaggagaactggggactgcagacttaggcatcctggtctgagaaaaaaggggctggagggtgggagtttgggttctcaggaaaaggagctgaaacctggaattcttccatctgggtccttatgaactttttaatatttatttatttatttatcttattttgttttttttctgagatggagtctcgctctgtcaccaggcccaagtgcagtggcacaatctcggctccctgcaacctccgtctcctgggttcaagcgattctcctgccttagcctcccgagtagctgggactacagacaagcgccaccacacccgtttgtttgtttgattgcttgtttgtttgttttgagacagagtttcactcttgttgccaaggctggagtgcaatggcacaatctcggctcaccacaatctccgcctcccggcttcaagtgattctcctgcctcagcctcccgagtagctgggattatgggcatgcgccaccatgcccagataattttgtatttttagtagagatggggtttctccatgttggtcaggctggtctcgaactccccacctcaggtgatccgcccgcctcagcctcccaaagtgctggggctataggcgtgagccaccacgcctggctgcttgttttttgagacagagtctcgctctgttgcccaggctggagtgcagtggcacaatcttggttcactgccacctctgtctcctgggcttaagcgattctcagctctggagtagctaggattacaggcaccaccactatgcccagctaatttttgtgtttttagtagagacagggtttcaccatgttggtcaggctggtctcaaattcttgacctcaagtgatctgcccaccttggcctctcaaagtgctgggattacaggcgtgagatactgcacccggcgtttacttttatttatttgtttgtttgtttgtttatttttgagacagagtctctctctgccacccaggctggagtgcagtggtgcaatctcagctcactgcaacctccacctcctgtattcaagcgattctcctgtctcagcctcccaagtagctgggattacaggtgtgtgccaaccctcccggcttggacttcagctgggactccttccatgggggtccttatgtaatgagcgtcatagattccagtcccggcaagcaagttgcccggtctcgctcccctcacgcaaccgagatttccatattgttcttcaagccacttcctggtaggaaggaagctggcctgggccagccccagttgctgcagccgggtgggagttgtcatcctggacccttcattttaagtccaaagttcaagtgagagaaatatcacagtc

SEQ ID NO: 97403 - DNA, 15455 bp, Homo sapiens
ttagttgtggtggggaagacaaagaaataagcaaacaagaaactagagttactatacaagaaactctcctgagtttgtaaaccttaagcataaggattcagttgacctttttcttggttcatcaatctggaaagaacttacataaagcgccattgacactgtcacctgggagctccatgggccgtaagtctttgacagccaatttaatttgaggtcagagggccttgaggtacacagtcagcactgtttgaacacttttcctgaaagcaaaactcacagctccctgcgccctctgacaacactagctatttctgccagagtaagaacttctattactattttattattgttcatatgtcttttgatgatggttgtgtgacagggggaagcaggatctatttggtttcttccccctccccccaccccttcctttttgtctctctttttttttctctaagaaaatcaccagactagtttttccatcttgagtaatttcttatgtgggacagttttgatcctcattttgaaagcatgcgtgtgcacatgtgtgttgcctgtggtgccaggtgagacaggtggcactaactccagctgcttggaaggcatcccaagggcgcatcttaaagttggagcagacctcccttttccagcccctggggccattagaccacgtgctggaactagcattgtaaaattcccatcccagttccactcccctgaagtgaaacccttttttttttgtgacagtaaatcttaaaaatcattgtctctttatgaacatttcctcagtttcttctctgctgaaaatgtaagccatgctactttttaatgtattttgaattttgtgctcattggaaattgatatgctaatgcctcccccaccccccgccagacttttctttttatactttgtcttgtttttactggggtaggctgggcatgcgtgcgtgcctttagggcagcattttaaacctttgccaaaattgcaaatgggacatgtacattcttctgctccatcctacttaaacacctatcagctatttttatctttaaccttttctgtatgtttgaagtgtgtggggggtgtgtgtgtgtgtgaaagagcgagagaatgatgtcatctaaagttttttgaagaattatttggttttcattgcattaaaattctatcactcccagctttgttttcatttaaaaaaatatacaaagagctttgtaaatacaacacattttatttctcccccttcttttaatgtacagcttttttgccacttatatatacttaaaatattcccatgaattatgtccagttcttcttggaaaaaaatttggttttgaatgaacctgcaaagcatcctgcagcgtgagcagctcctccacctggagctccgaagcatcttctcaggccaaagcggcattacccgtgaatctgtcttctccgccacagcatggtttgaggcgcagtctgttaatatagctgggccatgtcagtgactgttgtgtttgtggggtcaggtggggggcatggtatttgcaaaaaaaacaaattatggctaatttattattttgttgcagtggggttaactgtaaactcatgtaagagtctgtgatttcctcattggttgatctctctctctgtaatcctcattgcaaattttcaccaggacagcgttttttgattagaggggagctctggcacagtatgctttaatttagcaggaacttccagatgatttaaattctcgatgctgtgatgacacacatatgatctttcgtgtttctgagcgactctactttcattgtttgccagcgtggctcgttgctgttgcccaataaagcttgtgtacgttctgccttgggggattattttaatttgtacagaaacatgaattctggtatcaaaatgaggactttttattataacgctcctattttttctttatttcatggtacatgaaatgtaaagaaaactctttccagttcagaaaattattttgattttggcaaaaaaaaccccaaatcaatgcatgttatttattattttgtactattgtccatcccagacgtgtcagaatttcaaaaggtgatagatataaatggaaaataagatgaaaaccataagcttcatattgtatttctatacacggtcctcgatgactggaatcttttttttttttttttatcgagggatggaacatataggaacagtcagttaagttttaggcagaaaaaatttttaaggcccggcgcagtggctcatgtctgtaatcccagctttgggagaccaaggcaggaggattgcttgagcccagagtttgagaccagcctgggtaacgtggtgaaactcatgtacaaaaaatacaagaaaacgagctgggtgtactggctcaagcctgtggtcccagcgacttgggaagctgaggcggaacaatcacctgagcctcggaggtcgaggctgcagtgagtcgtgattgtgccactgcactcctgcctgggcaacagagcaagactccgtctcaaaacaaaacaaaacaaaaaaagcttttgtgtaggaagtagttgaaatcaattgggtgatttttgtcccttgggggacacgtggcggtatgaagaccttttcagttgttacaactcggggaagaggagtgctacaagcaagagatgctgccgaacaccctgtgattcacagggtggcccccacaacagagcccaaagtgtcaaaagtgccaacattgagaaaccctaattattttttttcgaggtggagtcttgccctgttatctaggctgcaatgcagtggtgcaatcttggctcactgcaacctccgcctcccaggttcaggcgattctcctgcctcagccttctgagtagctgggcctgccaccacgcccggttaagttttgtatctttagtagagacggggtttcaccatgttggccaggctggtctcgaactccaggcctcaggtgatctgcctgcctcagcctcccaaagtgctgggattacaggcatgagcccatacgcccagccagagaaaccctaatttaattggcacgtgtcagctgtaccatttgtctgtctgtatttgtaaaagggcccggaggtataagctcgtgtgtctcaggaagcaagttatgcctccgcctactataccaaatactataccaaatggtgtaattagtggctgtctgcagtgtgagctgctggttccctctttttggttctcaatggaaagggccatcctcagtatatagattagaaagataattgtaacttagttgtgttatctcatgacagcagcaaaaggaaggtatgtggtttcaaaggtagggaccgaccatgctttcccttaaacgtgtgctatccctgcacgaccttaagcctctgcatttgcctgcagtgaacttccgtccatgtgcggacactcctccgccggagccgctagggggaacttgaggactgaaagacattgctgtttcctgttttccacaaccagccggaccccacgtgcccaactgccctgagtttcaagactgtgctttcatagcttcagaatttatttcatggccagaggctccgtgaaaaacagacatttcttttcatgttgttgaccagaatattttgctggacttagttaaaaaaaaaaaaaaggaaaaaaaaaaggcagggagggtgagagatgaatatttatttgctcttggatatttgcatttttgaataattggcaagtaggaagctttgccaattcactgttcagtctaataaggttttgagacgaaatgtaccaacaccccaagtacttttagtgtttttgttatgaaacttttcagggtgacatgaagccctgtggtatttgtgaggaggtctataaatgatggatttgctcacctcaaaatagaactgtagtcgctccaaattttccagaagtgggagcacagtgacagaattcattcaggacttgctaatttcctactttaaatgggttacataacagaaccggtcccgccttcgcgcctctcaaaactacccatgaagtgatggtgaaatgtatcattaaaagctagaaatagctctgctaaactctgggaaaaagatgaatttttttctgatctccctctccccaccccccttttttcacccaaacattgcataatgttaaaaaagtcaaatctttccgtgggatttaatttcattttccatgtggctgtggtcggaggggtaactcaagcactttgggggctggtggatttttggaggatcacgcattcccggatcagtttgcatccaaagccttagccgagaaatacacccaatcctggggtttctccccatccctcctgccccccttttgtggatgagttatctataacatagcatcttttcagaaagcctgccttcttgcaggaatgcccaaacaaagccaccctccactttccatgttgacgttttgattttgaaatggattccccctgaaatttggggtaactgagtcacatgtgaagtcatcggccccacaacctatgcttgataccaagccagggctcatttcttagaattcagccagcaggttctgtttgcttacattaagaacttggtgttctaagcctgtggtgtttgttttcaagagatttaaaagaaatacattttttttctttgatcagatcaggtccagataagcccaggactattttttatttcctttgagaaagattgcagagtccagaaggaatggaaaaagtgttgggggatgggtaggagatgtgcagaatatgctgacatttttattccttcattgatcaaatatttgctgagcacttcctatgtgttaggcactgttcttggggctggaggcgtggcagggaaccagacaagcgtagtgtctgccctcatagtgattacactctgtgtgtgtgtgtgtgtatgtgtgtgaaagacaataaacagattaagactaacatcaggtggagagaaagcttcctaagataaagcagcctaagggttaggcagaggatgacaaccaggtaggaataaaggtggggaaagtgctgggagtcagagatgggcccactggagcagagggctgcaggatgagaaggagggtgctgtgcacctctggaccctgtaagagcagaagctggtagtgatgccccccaacctatccatgtgggtgccagccacaccgtccccctcaattttctcatgccttgtggggtttttttttttaatctcaaggaaattctgctttctattccattagtggatttaatgtaaaaaaaaaagtttttaatgattggccaattctattctccaagatccccaagtaaatggattcttttttttttttttttttttgagacagagtcttgcattgtcacccaggctggagtgcagtggcacgatcttgggtcactgcaacctctgcctcccaggttcaagcaattctcctgcttcaacctcccgagtagctgggattacaggcacgtgccaccacacctggctaattttggtatttttagtagaggcggggtttcaccatgttggccaggctggtctcaaactcctgatctcaagtgatctgcctgccttggcctcccgaagtgttggaattacaggcatgagccaccgtgcccagccagtcaatggattcttgaggagtccctttgctttctccttgggctgccccatgaggggtatgttctctagtcagggatgcccaggccagcctagcatactggggggaggttcatttctaactttgaacaatggctaaggccacaggaccctgggcaagtttgcaaaggcagagcgtcattcagagagatctggggaagtgacattgtggttgcagtgtgtgcaaaggccccggggtaggaaaggctgggcatgtcggaggggcacagggctggagtgctgagaccgagggggtggggcatggaggaggtgaggtcagggagatagggagggcctgcagaccttggcattcggactaaagagtccgttgcagaacgagcaagcattattaaagttagccctctacactgaaccatgttcgagggcccctttcactccttctcttctaccccgcctcaccgaccctttcccacctgttctcatttctgcgtctatgtccgaggaggctcaggtgcaaccctttccattggaaccaacccactcccatgcccagtggttctgcatgactttattgacataaccacactagtaaataaaggagagaagaagccagtccttggatgaagtttcctcttgcttttccagcgaatgatacgatgggtctctgttcagccctgtagcctggggtgcttttggcagaggtgccttttccttcgacagtcctggaaagcaggctgcataaaccagctgcctagaactgggaggtgagtgcggaggaagaataggtagagaaaacttaactggctcatgttcttcgaagctgccacatttcccgaatatgcccacttgggtcagatttcgaaggcgaagccttttgcagtcatgaactgcgggagcccaggctgtgttcaaattcctccggaagaaagaaagaataaacgagaacaggctgtggaaaagaatgtagttagtgtcttaaagatggccaaatattcattctcatttgtccttttatatgaaacagatttttaaaaaggcaattggagtagctaatgacatccagaaccccgttgattcgagtggggctgggggtgggggcttaaattggcccaaacagctaatcaggccgaaagaaagaggtgagttgattaccctggaaattgcacaggaattcttcaaagatgtggccaataattagagtttaagatgctactctttatgcacataacttagcataattttattaggcagctcatcaccaacagaattagtgaaaatcaggccagaaaaaatctgagagccaggcttatgcagacrtggaggcttttgctctaaaatggtctgctcacgcttggggaagaccccaagagaaagcactacctttcttctgggccctgagcgggttgggagtggaaatgaatcagagccatttcagggggctgtgctggagttggggacaatgtggcctggacctagctgggacggacacagacttggtttgaacaccagtttccccacttactggtgagtgagatggggccaattccttaaattctgacctcccattccttgcctgtttttgggagcaggaaccccatttgtgaggatcagccatgaggctgatggcattggaagcagtgcagatatagaaacagtagctgtcattatcactcgaggctgctgctgatggagggaggcctggtctccaccaagctcaaaagcccttcatcagaatgggtttatgctactgtttcccccaaacactgcagtcacctggctggctagagttcttagaagatttcaaagtttgggggcagaggcaatgtccaaccttgaatcttttttttttttttttttgagacagagtctcactctgtagtccagatgcccaggctggtgtgcagtagcgagatcttggctcactgcaacctctgcctcccggggttaagagattcttgtgcctcagcctcccaaataggtggaactacaggtgtgtgccagcatatctggctaatttttgtatacttagtagagatgaggtttcaccatgttggccaggctggtctcgattgcctgacctcaggtgatccacctgcctcggcctcccaaagtgctgggattacaggtgtgagccactgcaccyggcctcgaccttgaatctctctgtgcacctttcatggatttgcaaacttgcccagggtcctgtggccccagccgtggttctcagttggaggtgaacctgcctccagtatgctgggctggcctgggcatccctgactggagaatgtacctgtcatggggcaggggacatacagacaaaggagaaggcaaagggactcctcaagaatccatttcctcagggatctggaagggagaatgaaagtcatagaattggccaatcattaaaaacttctctttttacattaaaacaaacttattaatataatagaaagcagaatttacttgtgttaaaaaaatatagctaaggtatgcggggcttaatacctaggtgattggttgataggtgcagcaaaccaccatggcacacgtttacttatgaaacaaacttgcacgtcctgcacatgtatcccagaacttaaaattcaattaaaaaaaaaaamacacacaaggcatgagataattgagggggaggaggtggctggtgcccatgtggatgggcggcggsggggcttcactattggcttctgctcataggatccagaggtgcagcttgagaggaactggcttatccttagcaagccaggcgtctggcccatggttagggctcagtaaacctttgtgacatttgagttggtttttaaaataattctggtaaaatatacatagcatacaatttattattttaaactttattttttttttgtgatgagatctcgctctgttgcccaggctggagtaaagtggcacaatcatagctcactgtaaccttgaactcctgggcttaagtgatcttcctgcctcaggaccctgagtaactgggactacaggcccaagccactgtgcctggctaattttttaatttttttttttttttgtagagatgggggtcttgctatgttgcctaggctggtcttgaactcctgacctcaagtgatgctctcaccctggcctcctaaagtgctaggattacaggccatttcaactattttttgtttgtttgtttgtttttgtttttgagacggagtctggctgtgtcgcccagcctggagtgcagtggtgcgatcccggctcactgcaacctctgcctcctgggttcaagcgattctcctgcctcagactcccaagtagctgggactacaggcatgcgccaccacacctggctaatttttgtacttttagtagagatgggatttcaccatgttggccaggctggtctggaattcctgacctcaggtgatctgctcgcttcggcctcccaaagcgctgggattacaggcgtgagtcaccgcgcccagcatttcaacaaatttttaagtgtacagttcattggcactaagttcttgagttttaagagtggattctgggctgggcgcggtggcttgtgcctgtaatcccagcactttgggaggccgaggcgggcggatcatgggtcaggagatcgagaccatcctggccaacatggtgaaaccctgtctctactaaaatacaaaaaaattagctggatgtggtggcacttgcctgtagtcccagctactcgggaggcggaggcaggggaattgcttgaacccgggaggtggacgttgcagtgagtcaagattatgccactgcactccagcctggcgacagagcgagactctgtctcaaaaaaaaaaaaaaaaaaaaaaaagtgcattctggaagattcaggaacctgactgaacaaaatgactcttgccttttgatggctttttacacctgcaaagtactttcccacctagacctcacaatttcgtgaggcaggtgtcattatctccattttgtagatgagaaaaacaacaccgagagagggtgaggttgacccaggcccacatagcacctaaaatgattgaattttgtggttgaattttgacagaggatgtatctgtgagaaaaaacatctgttatagcagaaaactctcaaacgacctagtttaaataagatataaagtgctttctgtctcacatcagaggaggctggggttaggaggttcaggagaggtatgctggcctggattgtcactgggaaaccaaggcttcttcagctctgcactggcccatcctaaggctgctgcccttatcctccttatccagggtggctgctggaggtcccgccttcatgcctgaagtccggccagtaggaaggagcaaagagagggagccctgtcctttgagggagacttcccagagttcccacacattgcttgtgctgacatcttgggcaaatgaccacatgaccacacctggcttgcaaagaggctgggaaatgtagctgtttaacaagaatactgacaaaaagcaaggttttgtttctgaggcaggaggggaaaagaaggtgggcaaacagcagtttctacactagacaggggaaagacgtgggattctaaggaaccttcaccttaaattacttcatttacttactatatactatttttttttcttgtatacagagtctcactctgtcaccccggctggagtgcagtggtgctatctcggctcactgcaacctctccttcccaggttcaagtgattcttgtgcctcagcctcccaggtagctgtgattacaggtgcttgccaccacatcctgctaaattttttttgcattttttagtagagacagggtttcgccatgttggccaggctggtctggaactcctggactcaagtgatccaccggccttggcctcccaaagtgctggagttagggcatgagccaccgcgcccggccaccatacacttaaagttaaatgggtgccagaggtgagtgaacaggtaggagacgtgaactcgccctcttgtgagagcagtagctgtgatctcactaggcactctctggccagacacattatttctttttattttattcctttctttttttgcattccttatttcattcatcttaattttccctgaatctcttagtttttcttctcctgttgtctttttgttttaaaaaaatgagtatagaatacatacagcaaagtgtatctagtaggctaatattaaatgcatagtgatacatttttgcataggtttgcacccatgggacccctactgggatcatggagaaggtgtctgattcactttatgagaaactgccaacaaactcaaagtgagatagtactttatccttactaggatggttacaattaaaaggacacggtcagtgttggaggggatgtggaaaaatcagaaccttcgcgcactgctggtgggaatgtgaaatggtttgcttgctttagaaaacagtctggcagtttcttttgggggtgatggttgcacaactctgtaaatttactaaaaaccattgaattatatactttaaatgagtgaattttgtggcatgtaacttatatctcattaaaggtgttaaaatcctgccaaaccattttccagagtggctgtaccatttttgcattcgtatgagagttccagttctacatccttgtctgcgcttagcattgtcggtatttaatctagccattctaacagatgtgcagtggtatctcaccatggttttaaatatcatttccctaacagttgataatattgaacatcttttcatgtgcttgtttgccatccacttttcttctttggtgaaatgttcacgtcttttgctcatttgtaagaattagattgttttcttacttttgagttttgagagtttttaaaaatatactctgactatatatattgttggtaagtgatttgcatattcccctgccccacttatagcttgccttttcattgtcattgttgttaatatttttaattttagcctttctggtgggtgtgttctggtatgtcgttgtggttttaatttgcatcagatcacttcaagtctggtttgtggagtcttggttcaacagcagctatggctataggcaaaatgctttacctacagaatcgtttcaaagagggatattttcattatcttttgttcctttttttttttttttgaaacggagtctttctctgtcgcccaggctggagtgcagtggtgcaatctcggctcactgctaccttcgcctcccgggttcaagcgattctcctgcctcagcctcccaagtagctgggactgcaggcatgcgtcaccatgcgcagataatttttgtatttttagtagagatggggtttcgccacgttagccaggatggtctccatctcctgacctcatgatccacccgcctcagcctcccaaagtgctgggattacaggtgtgagtcaccgcacccggccttcattgtcttttctatagatgaggatttaagagctgtggtgacttgttcaaagtcacacaatttgtaagagatggagccaggattggtgctcaggtccacagacttagaggcagctgcctcttttaagctataatctaattcaacttcaagcctcctggtgaaagcaacagcctcccttctctccagcaagctgcattcttttatggcatgtcacaggaggttgaaaaatgccaaggcagatttccaaattaatgctccatttatctgaatcccatcattcccaagggccatcctcacctccatccctgacatagcacttcccagggaattgccacattccctagctgctgtcattgtggctgttcccaccttctaattaagagcagagccaacctcagaatgaggtagaggcctcgaaccatgagtcactgtggagatgtcgtcaccccgggggacgggaggagcccagcactgtctggaagcaccagtagacagccattgcatgcctatttattgagcacctactggatgctaggcagcttccaggcactggggatgtgatgatctagatgttcatgggtcctgctttcttactgagtggagtgtctatattaggcagtggagaaataaacaggcctccttcaggtcgtcgtttagttgtcccttcttaaagaggttttccactttgggaggccgaggtgggcggatcacgaggtcaggagattgagacaatcctggctaacacggtgaaaccctatctctactaaaaaatacaaaaaactagccagacgtggtggcgggcacctgtagttccagctactcgggaggctgaggcaggagaatggtgtgaacacgggacgtggagcttgcagtgagccgagatcgctccactgcactccagcctggggcacacagcgagactcttgtctccaaaaaaaaaaaaaaaaaaaaaaggtttccttgacctcctcccattggatgtgtagccctgtcacttcctagccccttgcttgctctacttgtcctcaggcgcttagcctcagtcttggtcactaaaatgtgagttctgtgaggacagggactttgactcatttgctattctgaatgcctagaaaaagatggcctatggtgagtgttcaatagacgtgaaatgaataaatgaataaacaaatatggtaattcattgcacagtgatgaatattatcataaagttaagtcaggataccatctgggagaccaatcgggatagaggttgggggttgggagtggggagggtatgggaggctatttttagacttggtggtcagggagagcctccttgaggagttggcttttgagctgaaatctgaaagatgagaggatccaggattcatagacgcaaggagcagtgttgcaggcagagaagatatcatgtgcaaattgccctgtggcaggaagcgttcagagttttcaggaacaggaagaagagcaatggcagccagtgctgaagagtggcaggaaatgggtattgttgcctagtaggaaggcttctatgtaccctgagtctgtccccaccatgccaggcagcaagctaccctctgacctttggagataagtgtgcagagcgggcctactagatgtcatgttgagagactccagatcccgggatcatggattcccatagccagagacatcaaggatatggttcatactccagaccacattgttaccccaagtacgactggtttctttctccaagttcagggatgagaaagctctttgaactcctgaaagaatctctcatgggcctaggaaaagcctctcaaaaaagacacttctgagagccatggaagttccaaatgagagtgtgtaccaggcacttggacctgtattttcttgtatcctcactctaaccttgcaggctaagtggagttaaactcatctcacagataagcaaaacaagatacagttaaatttcagggttggcagtttattaactatgaaatgctgggcaaatgttgcagtctgaccctgagatttttcatctgtaaaatgggtagatgtctgtgtgcatgtgtgcccactccataagtgatattgtgaaagaaaaataaatgtgatgtatgtgatatgcccggcatggtcacaatcaacttattgttccgtatcggttacagttctgtggttgcacacaacaaaaattagaactggcaaagttcagccaagaaacggggaggggaaatttattgccaggatgtggagtggctcacagactggagctttggctatgaacaagaatgagggcatgccggaaatgggaggtagcaggagctaatatgccgtgcaaccaggtccctcagcctgttttatcacctgcaggtttcttatcccgccacccccaccacatcactcccatcttgcatcactcaagggtcaacatcctcgtgtgagaatctgatgggccaagtttgggttacatggcagggtattttgattgacagttcctccaagactgcctgccatggggaggaagtaattccccagagagattgtttttgctttccccaggagaaagggtgacttagatgcttggtggtcaaagagtaacacatgtccactacagtaataatgttggcgttgccactggactcgctgtggtcaagactatcacttctctataagcttcagtttttactttgtccaatgaaggcactgagttccacaccagggtaactctcagcatctccagtggaactttagaaaaacgaggacgctctcttctaggccgtctcttttgatcagctttgaaagagtttcctggaaattctctcacatctcattggtcagcactggatacacgcccacccctagatcaatcactggtgtgaaggaaatggataaaggccaatcagagtcaagctctagttttccggaagcaagccgggatgggatgaccgtgtgccgagcactcacgatcggctatgctttgcgctctcaaggatagcagcttctgtggacggaattctcctagccagtaaagcttgaaaacgagggtcagggtgtccttttcggtctagactatgtccttggaagttggtttgtgctgcctctgctccatggatccacctcagagggaggcctcctgtcaccccgtcaggtagctcagccaccccgcggtactgaacctaaaacgtgccaaagcaagccgcgaacttccagacgaaagaaataccaggtgttagcatccaataaataaataaggttgtggctgaattgaaaaaagaaattcatcttgccaggcaccgtggccgcgtcggtgttgacttaaggcaggtcttaattatagtgccaggtaagctgtgctctgcctgcttcggggctgtccccagctcagctgtcaactcagc

SEQ ID NO: 97404 - DNA, 14974 bp, Homo sapiens
gagagggaactgaaaataagtaaataagttaacaaatagaagaaaaaggaaaaatagaaaataataatggaatgatatctggaaaatccccacatatttagaaattaaataacccatgggtcaaatatgtaatcacaaggaaaattagatcatattttgaactgaatgaaagtaaaaacaggacatatcaaattttctgagatgcagccacagtagtgctatgagggaaatttatagcaccactttgacatattacaaaagaagaaatatttcaaatcaataatgtaagcatttacttttttttttttttttttttgagacacagtctcactctgtcacacaggctggagagcagtggtgcaatctcagctccctgcaacctcagcctcctgggttcaatcaattctcatgtcccagtttcctgagtagttggaattacaggcatgcaccaccatgcccggctaatttttgtatttttagtagagaaggggtctcaccatgtttgccaggctggtcttgaactcctggcttcaagggatcctctcgcctcagcctcccaaagtgctgggattacaggtgtgagccactgcaccggccgaggcttgtactttaagaaaccacaaaaggaagagtcaagtaaaaccaaaattagcagaagaaaggaaataataaaaataatagccaaaataggctgatgtgggagaatcgtttgaacccgggaggcagaagctgcagtgagccaagatcactcctctgcacgccagcctgggaaacagagcaagactccatctcaaagaaaaaaaaaagccaaaataaatgaaatataaaacaaaaacatcagcaaaagtcagtaaaaccagaagtagttctataaacacatcgctaaagttgataaacctctggctagactgatcaggaataaaagagagaatacacagattaaccacaccagaaagagcagaagagacaccactacaaattatacaaatttatcattttaagtgatatttaaatgtcattaaatgacattaaatgacattttaaatgacaatagggtagattattaaaacctttatgtgaatacatttagtaagttagatgaaatggacaatttccttgaaaaacacaaactaccaaagtttatgtttggaaaatgagtaaggaatgtgtttggaaaatgagtaaggaaaaatgagacagccgggcgcagtggctcatgcctgtaatcccagcactttgggaggccgaggcaggcagatcacttgaggtcaggaattggagaccagcctggtcaacatgctgagaccccatctccactaaaaatccaaaaattagctgggtgtggtggtgtgtgcctataatcagttacttggaaggctgaggcaaggagaaacgtttgaacccaggaggcagaggttccagtgagccaagatcataccactgcactccagcctgggcgacagagccaggccccgtctaaaaaaataaaaaaaaacaacaacctgaattttttttttttcttaagacagggtcttgctttgtcttctgagttcaatggtgcaatcatagctcactgcagcctcaacgtcctgggctcaagcgatccttctgcccaagcctcccaagtagctgggactacaggtgcacctcaatacacctggctaattttgtaaaaatatttttgtagagacagggtctcgctatattgctcaggctggtttcaaactcctgggttcaagtattcttcctgcctcaccctcccaaagtgctggaattacaagtgtgagccatctcgtctagcccagatattgaattcttgataaaaaaaaatatttccacaaagaaaactccaggtctacatggcttcattggacacttaaggaagaaacaacatcaattctggacaaatgtttctagtatatagaagaggagaggtcacttaccaactcatcttgaagctagcattaccagataccaaatgacacaaagatgttacaagaaaagaaactacacacatatccttcatggatctagacacaaaatcctctttatttttttcaaaaatccttttaaaatttagcaaaatgaatacagtagtaaatacaaacaataatgcaccatgaccaagttagtttcatcccaggaatacaaggttggcttaatattttaaaatcaatcaatataatttactatactaacaggctataagacaaaacccatatcaccatctcaatagatgcagaaaaagcatttgacaaaatttaatacctattcatgaaaggaaaataaacctctcagccaattaggaatagaagggaattcctgaaactgataaagggcatccataggccaggagcagtagctcatgcctataatcccagactttgggaggacaagatgggcggattgcttgagcctaggagttcaagaccagtgtgggcaacatagcaagacccttctctacaaaaaataaaataatttttaaagggcatacacaaaacacctacagctaatatacttaatgatgaaatcagaaagttttgccctaagattgggaaccaatgatgtccactcttattcaacattgtattgaagataccagttatttcaatatatttctttgttgttgttgtttgttttttttggggggggggtgggggacagggtcttgctctgtcacccaggctgtagtgcagtggcatggtcttggctcactgcagccttgacctcctcctgagctcaagagatcctcctacttcagcctctggagtagctgggactacaggtgcacaccaccacagctggataattttctgagtgccagtagtggcaacaactcaatcactaatattcagtgttgatggagcaagctgggttgtggtggcacgtgcctgtagtcccagctactcaggaggctgaggcaggagaatcacttgaaccagggaggcagaggctgcagtgagttgagattgcaccactgcattccagcctggacaacagagcgagactctgtctcaaaaaaaataaataaataaaaataaaaataaaaatttttacccttttgacagcatgtcaggcttctgggttctgttccccgagctcaaccctaagccaagcattttaaggtttgaggaaattaacttctcccagtttggaggaacattatagaagaagagataggagccattttaaatcatgaatgaaggaaggaaaaataccatagaaaagtctgggggtttgggtggtagaattggagaagctgacaatgtgaaagggagggaggaagggccagggcatctggaagtttcatttgaggggttcctgggagtttgtttctctagttttggggaatcattccctttgggcctgtctgatatgactgctgaaagagctgagtccattgtgcaatgcttgcaaaggtctagtaagaaggccatgctcttgtgcaaaagaaaatgagctgttttttcttccaaatctcagagtcaaaggagtcccagtgcttcagaacgcactccagaggaggggaaggggaagacagtgagggcgccacccctactgttttccctccttggttcctgggtcccagcatcttgttaaacatgcctcccatggttgcaggtgtgacccccagccatggaaccagaggaactaagtgattggggttagtcatgcttacccatgtgactctagtcctgcacttatgatttccttttgacttccaagacttgtgtgacctgtgtggctccctgaaaaatggatcttgggagagactatgtaacagttgcatttaggcaactgttgtatttccctccataatggaggaagtgtgctggtttgagctctatatcctgctattatgactcgtgctaaagtacccttagagaatggttccagttaacttccggacttaaattacccttactatttaagtactattttaattacaagcagaataggtgccttaaaaaaaacataggaaccaaatggctattttcctgctgatgggacagtattgagactaaaatttggttttggaggacattttcctccttattgttgaagacagagttttcccatttatggaagtagcataaagcctggtgtccagcagaggggtgcaaaaagggaggagaattgggaagccagagtgttttggcaaagggctgacaatgtgcctcatggagaggattcctatgccactgggtagggccgttgacctttaaatgccatgtgctctccagaccaagggcagagagagacctcactatggggagaggaggggaagacccactgttcctagaaaatcacaaaaatggcattgccttgagctctacctcagttactacggtatttcctgatcttgcctaacaggattacttccttgaactgtaaaaattcccactgcttcagaatgttctccccagcaagcctgtcccccaagtcttgtaaggctgccagccacactaatcatttttaaatagctgaagggggcccagtatttgatttgattttaaaatggaggccaagaaccttgaaatgaaaggacatggttgaggtccactcctgtcctcactgttctgatgatgataccttgatcccacctggggccccaaaatgaagcagtgtcgttcatctggggtaagacccaaggttcattgcctcatgccaaggaatgaagcagtgtcgttcatctggggtaatacccaaggttcactgcgtcatgccaaggaagtcaaggacacgaacacatgtgaagtgaggttaagagcagaggtttaataggcaaaagaaaaagagaatagctctctctcctgcagagagaggggcacctgagtgggtcttccagcctgcagcagcatgcacaaggacaggcatgaggaggcagtgtctgatttacatagggctcaaagattggttgaaacaggtgcgatgtttacatagtacaggaagaagctccccgccccaccctaatctattttgcaaatggatttttttttttttttttttttttttttttttgagatggaggttcactcctatttcccaggctggagtgcagtggtgtgatctcggctcactgcaacctccacctcccaagttcaacagattctcctgcctcagcctcctgagtagctgggattacagacgcctgccactacacccagctaatttttgtatttttagtagagacaccatttcaacgtgttggccaggctggtcttgaacttctgacctcaggtgatctgcccgcctcagcctcccaaagtgttgggattataggcgtgtgccaccgcacctggccacaaatggcttctctacctggctggcgccacgttgcctgctccttactgtacatgtggttgataaagaaaaaggggagatggagccaccatgttgaacatgcctagcctccagggggccttttcctattgccagagctgctggcattcacccctgcaagcttccagcttgctgatctatgtctgcagcttgattttacaggctgcacttcgttaggaaagaaatgattcgggggctgcttttcattaaaaggaaaaccttaccaaggacttccttaccctcactatctgcctaaataagttcttagatcacagggagtgtccagtgtgcccactggcctccagatacccaagcctgcagatcacacacatctccacctacttccagtgcatcattgcactcacaaggttcagaagttccaggacagccagccatggagcctgtggacagggagtgcatcgtgaaggttgccaaggcagtggaggcccaggttatggcagcccaggaaatgagctgggaggaaagcattcaggaactgatgagcatggagaaagaaagcactttgtaggaacagatgaggaagacgtgggggatgatgtacagaagttacaagtaagcggagctgatattaaacaggattttgctacacagagaaaaaggctagaatgtatatgaatgcttttttttttttttttccgagacagagtcttgttctgttgcccagagctggggtgcaatggcgcgatctcggctcactgcaacctccgcctcccgggttcaagcagttctcctgcctcagcctcctgactakctgggattacaggcgctgccaccatgctcggctaatttttttatttttagtagagacggggtttcaccatgttggccaggctggtctcgaactcctgacctcgtgatccacccgtctcggcctcccaaagtgctgggattacaggagtatatgaatgcttttatccacaccactaagaagagaattgaacatgttttgaaaacacaagaggaaaggcagaaacttcattacaaatattctaagcagtttctgactttgtttcaagattggaacacgaacagtgaaggctgaggaaccagaggaacaaaaactagctacaatgtttcgagagcaacaaaagagttgtctataagctagaatggttcagagacagagacactgaaacaaattaaactgaaatcagcaattcctacggagtttggaggacctagaagagaatcagagttcatcttactgatgaacaaagtgaccttagaaaagaaatggccaggttgcaaacaaaacttatgaaggaaactctgcagcaagacttggcacttattcatttgtctcttctacctgtgttactcttgtgactgaagaaagaacttgaaccaatgtataatggttaatattgagcatcaacatgataggattgaaggatgcaaattactgttcctggtgtgtctgtgagggtgttgccaaaggagattaacatttgagtcagtggactgggacrggcagatccaccctcaatctgggtgggcaccatctaatcacctgccagcccagctagaatagagcaggcaagagaagatggaagagcagacttgctgagtcttccagctttcatttttctcctgtgctggatgcttcctgcccttgaacatgaaactccaagttcttcagcttttggactcttggacttacaccattggtttgtcgggggctctcaggcctttggccacagactgaaggctgaactgttggcttccctacttttgaggttttgggactcaggctgatccaccactggcttccttgctcctcaacttgcggccggcctatcatgggacttgaccttgtgaacgtgtgagtcaattatccttaataaactcccccccctttgtttgtttgtttgtttgttgaaacagagtctcactctgttgcccaggctggagtgcagtggcacaatctcggctcaccgcaacctccaccccctgggttcaagtgatactgtctcagactcctgcatagctgggattacaggcacctgccaacacgcccagctaatctttgtatttttttagtaggatggggtttcaccatgttggtcrggctggtctcgaactgctgacctcagataatccacctgtctcggcctcccaaagtgctgggattacaggcataagccgccacacctggccaatcaactccctttcttatgtacatatatcctgttagttctgtccctctagagaactctaacatgctatgttatatgacataagcatgacattaactacactaaaccatatgacagtgtttttaaaattcttgtataaagcagtatctcattagtttgtgtgttaaatgcaagaccttgcttctttaatctgttgaatgaaccccaaacagttatatcagtaacagcaattgcacagttatatacacagtcaattaagttttagcactaacgataatttaattttaggtgtggcctctgtggatctgtatcagtcccaaaatttagaaagcacaggcatggaagggtacatttttctcacctaaggaaaaacagtaagataaaacaaaacgttaaaataaaaaatcggccaggcatggtggctcacgcctgtaatcccagcactttgggaggccgaggcaggcggatcacgaggtcaggagattgagaccatcctggctaacacagtgaaaccccatctctactaaaaatacaaaaaaattagccgggtgtggtggtgggtgcctgtagtcccagctactcgggaggctgaggcaggagaatggtgtgaacctgggaggcggagcttgcagtgagccgagatcatgccactacactccagcctgggcaacaaagtgagactctgtctcaaaaaaataataataaataaaaaataaataaaataaaataaaaaatcgatgccccctcctccttcagtctttcatacagcacagaacagcttccttagtttgaggatgattaaatatatgagatgctctccagatccagctctgcttctttagatttttttgttccttctcacttacttattatttttttttgagacggagtctcgctctgtcacccaggctggagtgcagtggcgcaatctcagctcactgcaaccttggcctcctgggttcaagcaattcttccacctcagcctcctgagtagctgggactacaggcacctgttacctcgcccggctaatttttgtatttttagtagagacggggtttcaccatattggccaggctggtcttgaactcctgacctcgtgatccacctgcctcggcctcccaaagtgctgggattmcaggcgtgacccactgcgcctggcctcacttatttattttttaattaacaaataaaaattgtatatatatttaaggtgtacaacatggtgtcttcaagaatctctttagatatgaaattgctgaattcaagagaccatcaactatgagatatagtatccggaagattctaacggatgggatgtgacatagcagaaaatgcatctctgatggggatagtcaagacacagtctcctggcaggtcccggggctcaccttctccactcaggactgttgctccaagtgttacagtttattttccaaagataaccactccattctctcacgtgctctttgcacaggtatctttgactctcctcccaggacacaagagtgatgttatggacttctgaggctgggacataaaaggccacatggcttctgcctagtttgcctgggatgtgctcccttggaagccacatgcagaggtcacgtgtgtgccggttgatgacagcagctgatattccagctggccctcagcagcaactgccacatgcttgagtgaatgtcttcaggcaaccctagcctccagctgctagatcacctctgagacactgaggaacagatgaggcttccctgctgagccctgctctaacagatttctgagctaattgattgttttattacatattattgaggcactatatacaactgacccacttaaagtgtataatttaatggtgtttagtgtattctgaattgtacaaccaccacagtcaatttcagagcatttttatcacctccccaaaagaaactctgtactcagtagcagtgaatctccatttcctcccaaactccctctcagtcctaggcaaccactcatctactttctgtgtctaatagatttgcttattccagatacttcatataaatggaatcatacaatatgaggccttttgtgactggcttctttcacttaacatgtttttaaggttcatccacattgtagatgtttcatacttaattcctttttttttttgaaaaatgttccattgtacatacagatattttgtttatccattcatctattaagattgacatttgggcagtttccactttctggctattatgaataatgctgctataacattcacgtaatttttaataaggacatatatttctttttttcttttttttgagacagagtctcactctgtcacccaggctggagtgctgcggcaagatttcggctcacagcaacctccgcctcccaggttcaagcgcttctcctgcctcagcctcccaagtagttgggattacaggtgtgtgccaccacgcctggctaatttttgtatttttagtagagatggagtttcaccatgttggccaggctggtcttgaactcctgacctcaggtgatctgcccatctcggcctcccaaagtgctaggattacagacgtgagacactgcgcccagcctcatttcttctaggtatacctagggagtgaaatttctgggtcatataaatgcttaatcttttgaaaaactgccagaatgttttccaaaatggttgcaccgttttacagtctcaatggcggtgtcctaagtctcccatttctccaaaccctcaacacttgttattttctgtattttattgactctgatgatcctagtgcttagcagatttgaaggggttttgatttgcttttccctgataagtactgattttgagcagctttccatgtggttactgaccacctgtatgccctctggaaaaaggtctattccaataatttgcccattgtttaattgggatttctttcttttcttttttttttttcttttttgaggtagggtcttgctctgttgcccaggctggagtgcaatggtctgattttggctcactgcagcctccacctcctgggcccaagagatcctcccacctctgcctctcgattagctgggaccacaggtgcccgccaccatacccgactaattattttggtattttttgtagagacagggttttgccgtgttgcccaagctggtcttgaactcctgggcttaagtgatccgtccgcctggcctcccaaagtgctgggattacaggcgtgagccagtgcacccaggtgggttttctcttttattaagttgtaagagtcctatagctagaatagatacaagattcttaacagatatgtgatttgcaaaatactatcccattcttgggttgtcttttcactttcttgatagtgttccctgaagcacgaacactttcatctttgatggtgttgactttactttttcttttgccacgtgtgcttttggtgtcaacatctaagaaaccactgcctaatccaaagtcacacttgactcaagtattttcttctaagagttttatagtttaccttatacatttagatggtgattcgagttaattttttgtttatggtatggggaaggggtccaacttcactctttcacagcaggacatctggatgttggtgaagatgattcttttccctattgaactgtccctattgagttgtcactcaactctaaaatcagtaagagtttatttctggactctcagttctgttcagttgctctattcttatgccagaaccattgtctttattactgtagctttgtagtaagttttgaaatcagaaagtataagtcctccaactatgtgtttttcaagactgttttggttctcctgggtcccttgaatttccatatgagctttaggattagtttgtcaatttcagtattaagaaaaagtcagctgggaataataggaattatatcaaatcttttgatcaataagatttttttttttttttttgagatggggtctgactgtgtcacccaggctagagtgtaatggcatgatctcggcccactgcaacctctgtttccggggcccaggcgatcctcccacctcagcctccagagtagctgggaccacaggtatgtgccaccacacacagattaattttttgtatttttggtagagacagggtttcaccatgttgcccaggctggtctcaaactcctgagctcaagtgatctgcctgctttgggctctcaacgtgctgggattatagccatgagccactgtgccagccttggattttatcttttcaagcaacttattagtgtggtttgttgtgcaaagataactgatacaccattccacatgggtgagcatctgttttgttacgggtaaacagaaaagacggtgacaacatagggagatctccactccacaaaaaaaataaaaataaaaacttctcgggaggctgaggtgggaggatcccttgagccccggaggtcaaaattgctgtgagcagtgatcatgccactgtactccggtctaggtgacagagcaagagcctgtctcaagaacaaataataaatataaatgaaaaagtaaatttccaggttgggcctctttcattgcttcaagaagctgctccaagtgctgcctgctgccctgcccatggctggagggattttggtgcactgggaatgcagcaggttcagcaaccactgaaccaaggattcttattctcagccttggtgcctcctgtttggagtaggggtttccaagggaaatgaggaccttggctgcctatgtctgtccccatgccgaacaggaggcccagagccaagactgagaacctaatgggtgaaaagacaagaggctttagttaagacaagaggaggctaagattgagagcttcaagatgttccacagatcctgggaagtgttcttcttcttggtagtgactctaatggtagtttctttgtcccagttgtttcattcctaagaatgtattgaggcaactctgaattagagaaaatgtactgcaggtgtatgactctcttttctatcgtgtgtagaagagtgagagacacctcaatgttgagaggtcaggtgggtattcagaccaggggcccgaggagaccctgggagggcagtgtgcttctgtgaccctcctactacctctgccctctgaagactccagcccatggttctgccctttctcagtccccaggtaggatgggaaacaaagtgttaacagcagagaaagcaagtttttggggttcactcaagacctaggctacagccaggtcaagtgcctgctttattcaacaggaagcgctcaagtgggactcaccccccacctttcacagtgtaaagtgaatagggagcaaggcaggaagctagaaaaataatgcatggatctagacaattcagaaaaacccttctaagtcagcttaaggccaagactggtcagtgtgagagaacaaaagaggtgacagaaaagccttgggcagcctgagccatgatgggcctagcggaagtagttgggacattcgtgagcaaccaaatgccaggcttgattaaaggcatccacgacagccggctccaggggcccttcctctgttgctgccaagttctgctccagctgctccaggctggacatgcccaggatgaccgcgtccccgtgggcaccctgcaagggagacggccagacttcaaccctcttctgctgcacagcgactccactcacagccgtcccagccacctccctgctgagatctggggtctctgtttatatttatatcttgtatgtccagaaaggacttaaggtgccttggatagctgtacccacgtgacttgaaacccgcatcctttcccctactgccgcacgacgcttccacacagaactacattcacagcccagttctgcccccagcagctgtgtaaaaatggctaagttggctgggcacagaggctcatgcctgcaatcccagcactttgggaggtcaaggtgggaagaacacttgagccaaagtgttcaagaccagcctgggcaacagagagagactctgtctctacaaaaaacaacaaaacaaaattagccaggggtgatggtgcatgccttgtcccagctactagggaggctgaggcagaaggatcacttgagcccaggaggttgaggttgcagtgagctatgagtgtgctgctgttctaccgcctgggtaacagagtgagactctgtctcaaaaaaattaaaaagcaggctacgttattaagcttgttttgacattcgatctttttttttttcaaacaaaaatatttttccttgtgttttgtacacaaaagggggtgggaggtagtgcggtgtggtggtggcagcggaaaaatatggaacacttcacaaatttgcgtgtcatccttgcgcaggggccatactaatcttctctgtatcattccaattttagtatatgtgctgtcgatgcaggcatgacattcaatctttttctctgttttcagcattggaatgagaaaacttatgtaaaacacagctcccacgtactgaacatctaccggatatatgccagacactatgcaacatggaaggctgaagctggagataagtttgttgctgttattttcattgttgtttgcttgttttttttagacagggtcttgctttgtcacccaggctaaggtgcagtggtgtaatctcagctcactgcagccttgacctcccaggctcaagccatcttcccatcccagcctccagagtagctgggaacgtaggagcaagccatcacaacctggctaatgtttttgatttgttgtagagatagggtcccattttcttgcccaggctagactcaaatgcttgagatcaagcaatcctcccatctcggcctcccaaagtgctggattacaggtgtgggtcactgccactgatcaggaaataagttttaaccaggaagacatgaggcatcaagagagagaaaccaaaagggtgagatgggtgggtcttagttaaacctgtgttaaaatgtctgccactttaatagctgggtgaacctcggtttcctcatcaataacactgggataatcatacttcagaaagcctaaggaataagaaaatccctgtaatgaaaatccctcactacaaagcctccactcagataccatcaaagaccagtgggaagagtgcttatgagaattggaagaaagaaaaatttcagaggaattcagaaatcaaatgctttgggcttcacctaaaggtgacgctggtccccctggaagggaagaagctgagcacccagggtcgctggttacctgcagctgtgagtggtggtacatccaccggagggcagccgaggtcacactgggggcgctggcgccatatgcggcctgcagggccttctccaccaacgcaatggcctcgaagtggtgctccttccagaagctgtgcagaggggatgttagcacaggggtcagtaccatgggggtcacactggg

SEQ ID NO: 97405 - DNA, 25703 bp, Homo sapiens
ctcctggaccacccatgggcttggccaacagaggggaagtgttccctttggcagtggtgctctgagtgtgctgggatgtccccaggcagtgcacatgatggggactgaagtccaatacactccctctcccattctctctctttgtctgctaatagcagcagaggtcaagtggaaagcagcctgctctagaaggccaaaggtcatctacaacaatcaccctttgactggtagatgccctaatatgtcagtcggacaaatgatgcctatggctttgaacttgactggggttaaggcagggaccatgagtgagcaagtggactagaggttccaaactgagggaggcactgttgctgttattcaaatacaatgagtgcccacatgcatgagtgaacattttggagagaaggcaactgacctgtagtgccatgagctgcctcattccatcttaactctctgaaagtagaaccaactgaagcctacataccctacttgtctgtcaaattctgcatggaactctaagctatttctcttctatcaatggggatacgggctctgcttaagacagaaaaccatctgatacaacagggcatttacggcagggagcactgggcttggaaccatggatcccacaatagggactatgggaattacaatgcgcaaagctgttgcacaccttggttgaaaaggttctaggatctggcattctagtggaatttctatcaactccaggcacaatatactgttctcttccactctgtgaacctttctccccacaaaactccccatagtggaatataataatttcctgtactatttgtcactcacccactatgcacaaagtatcagctgcttttaaatatgttaaagagtttaagccagcctatgaccttgtaatgcagattctaattattcacgtttttactagatcacaaaggtaaataatttagctagaatcacatgactagctaaggtggagatctgagcccaggcctgttttgttccaaagcccatggacctttctctgctgcccactaggcttaaggatttgtgtatatatatatatgtatatacatatatatatatatatatatatatatatatatatacacatatatatatatatatatatatgtatatgtgtatacggatacatatatatatatataaacccttaatgttttttatttactttttatttacatgtttatttatcattgttattattgtaagacaaatctgatatggattcctagaagcctgaggtcttaatgaccaagtgcaatgtagagatctcctatgtaacacatgaacagagacccgagacagacatttctccctttgctgacatcagctgtggtagatccccattttaaattcattcctttgcactccccaggtgcaaaagtacctggacatagtaccaggtacacagcaggcacttgccatttggtctcatcattgctaagttgcttattagtaataaaccctcaaatgctgggagatgaaatattactagctttgatgcaaaaacaaaagtctagacactgggaaaaacaccaatggggcctaacacacatctaggccccaccaatggtgtccagcattgggtgaaaacagtagtatttgagccttactaatatgttcatcctgcttggtctatatcttatgatcctccactaaaaagagtaattacggccatatatggaaagccctggttttgtaagtggggtcaacttcaagtgactctggatctaagttctctcctctgtagaggtgccatccaacacccactcagagaatggctgtgaagattacaggtaccacaactatggatgcacaaacaatccaatcaaccccgtggcatctcagcattcccatggtgtcctgtgtgtataactacttcaaactggagcagattcagacccctgtcccaatcctagcaacacccctcagtagctgtgtgacctcaggcaagcaacctagcttctctgagcctgtttcctcaccgcaaagatgaaataccacctatctcatggggttgttttatggactaaataaaataatatttgcatgtgtctgcctctggccccatatgtaggaaaaaactcagtaaatactagcagggtttaaacatactcagaacagctctgactacacacatcctgttgaacagggagtgcggtcaaaaattatcatggtcacaagtaaaggagataagagaaaggaaggtagtgagaagttcaaattagaggcgattttttaaaagcttcctcttttcaaccaataaggtcaacctcttgtttatcaataatacgacttaaaagtcagtcttagttgattgagcaagctctgccccttgccctccacatcctccaatgaaggtagaaggaataacgactacagggcaggcaaccaatgggggcccaggagagctgagaactggctgtactgacctgggccattttggtgaaagggggtggtctcagggaccttgaactgccagcagttctctatcttcagacgttcctctaacagtttagaaaccagaggtcacatcaaggcactccccctcaataaggcatgtttcagaatccaacctaaactctaatcacagttctgaaatccaaatctagacaagcttcaaagtacatcactccctttattgagcacctagtgtgtgccaggttcaatgctaaacatttgccatacaatatctgcaccaggggatcatcttatttttttaaaccccattttgcagataaggaaattctactactggacttcccccaaagacattctctaagactttcagctgctcctgtgttctcaaggatgtaagtctgtatgacatgtggaaacttctgccagagtcttcaactctaatcatagtgctggattctacaaaattcatcacacacaacttatccccagagcaaaagtgggtttgggaagaggctgaagctgggacagggagacagagagaagaccttggccctttagaagcacagcctggccacctctgatgtgcaaaccctggccagaggctgcagggcaaagtgtgcatcttctttctgcacaattaatctctcccaaagaaaacccagacaaagtcacctggcccttctgaagtagggccggggggaacccctcctcctccaagattcactctaaactcctaacccttcctccccaccccagggagtggctacatggttgttgtttcttttcttttttccctgtggtcctttggtaacaccacaaattacgttttcagggactggagtcccagagtgcaatgatgttgtaataaacataaccaggaccaaatgccttcccatcatattagatgatgccatttcccaccaatcaggctccttgggcaggcagaccactcaccaatgagggaccagacagaggctgtgggggggagacctggtcatctgcaactaaaaataagggcgcttcatgattggctgctgccactttgcaacaggagttgggacccacacaccaggcgccacacagaacgacccacacaggcaaaaactttcacagcccaggggttcacatggggggggcttatccggctctgtttgttttgtttgttttcctaatttgctgacttgttacaagaaataaagacctaatccaggggaagcccgtcgcagacacaccctcccacctagacacctcggtttccaaaggcccttcgcagccacaaagaactggggaacaggaggggggcgtcggccagaggccaagacactcacctgtccggccgtgtcatagagtcctaggaggtactgcttgccccccacggtgacgctgactgcaaggacagaagtgggggcggggagagaagctcacagtgacctgggctctggggcaatttcgctccccacccggaccctcctctcccaacccagctagaggcgtgggggcgctccccgcgagatgtcacccccttttcccgtgcggccagctcactgtgaaccggcaaagggccggggtgtgatgtggtccccagccgtccacccccttctcccaagtcccgtagccacgtctcgctcggtcccctcgaatatttcccccggggccttggggcagtaggaaaggggatgtgggaaggtcaaggaggacggcccagggcgccgaggggtaggaagtgcggggagcaggagccgcgtagggggcgggtgggagagggggtggatcagcgggcgaggggttgccaggagcgaagcttcgggggtggggccggccgcctggcagagggcgcggcgggggaggggagaggagtgcgctctggggaggcggcgagggggctccgccaaagttgctccaaagttcccggcccggggagcggccccttagtcagcagttccgaggcttacctgcgtagtggtcgaagacggtgggcacgtactcctccgggaaggcgtcgttggcatagctcatgagtaggcacgtcttgcccaccgccccgtcgccgaccaccacgcacttgagcatcagcgcgccgggcccgtgagccatgctgctgccggccggcctccgggcatggtccccccggagcccccgccccggccccgggctcagccccagcccgcctggggggtccgccgccgtcgccgccgctccgcgccgcagggccgcccccccggccccatgcagcggctcccctcgcaggaggggagggggcggcgggcccggggcgctgccgccgccgcggtcgccgcccggatccccgccccggccccggtcgccgcgcccgcccgctgcccccgccactcggcgcccgcgccctctccccggcccggcctccccaggaggatccgccggatcataagaccggccggccccgggggagacggcaactttggggagggcggcggaggggaggggccaggcggctctccccgccccgcgccaacccgggcccctcccgcggcgccccggaggagggcgggcccaggcgcctccccgagcgcggcccgcgccacgcgcccccgcctgctgccgccgcgcggccctgccggcgcacccgagccccactccctgcgagggccgcgcggaggggcgcgcaggaggaggaggagccgaggaccgcggaggggaggaggggagtcgcctggggagccgagggctcctcgcgcaagtgcccgcagcgcccggaagcgtccaaaggccccgatgctgggagaagacgtggaggcctctcggggaaccacgacgacctccacgatgacgcaatagtcatgccaaattatacatgcatatttcacctccacccggaaggccagagccatcctctcggcctctaagtgcacaacggaactagaaatcaaggaggagagaccaaaagggtaaaaaaaaaaaaaaaaaaatttaaggcgcgtggggtggtggcggtccttgagctggaaagcaggaaccctggcttattgcgtggtcccccccaccaccaccaccccacgccttccgtagcacgagctttaatcatttactatgaaaccggtaactaagggagatacagcgtgttgaaccactgaagcacgcccctccacacacacaccagccagaaaaaggataccccgtcggctccggacccggcaaatgtacctgggctccccctggaggccacattctccgaggtcgcctttcggtccccaatgttcctcaaaggtattccgttgtaatcccggagaactgatacacactagtgctctgaaacttggcctgtgctcgaggcggcaacccctgcccctctgcctggcgatgccggaacacacccatctggccaggtcctgttcactggccaagaatgcagcattgaacactgggcattggggcgggggtgcactctgcgctgacaccgcacccctcccctcaacttgctgactagaggtaatcgcttcctttcatcgattcacagcgttagaaaaatgcagcattgagaggcagcgcggaggtcaactggaccatcacccttaggttgtagggaagaaaactgagacctagaaaggtgaagcggttgtcccaaaggcttccagctgctcccagtactcaagracttggagcacacttggggaaatgctcactgttgtattcccgttcctcactatccaggaggcctgaactctcaaactccgaatctgatttycactctcccaggaagkcttcggaaatcactgtaagttccttgcagattctcattgagcctctccccaggacccaccctttggccctgcgtgtctgcgactaggtatgcgcattgctagctgctttagatgcaatgaatctggaagatattttgtatggactgaataacaggttgaggaaggcagaaaagtgccttmaggtcagttcctggttcaagaccggcctctgctacttgctcttagagagaaagagagcagggcctgccccattcttggcttgcaggaccatttgttcaggcagcatttgcagggactcgtgtcctgaaaggagggtctatccaggagcttgaaaaggagagcactcagccaggagagctgagtttggtcctagctctgaccctggttagcagtgttaccttgagcatgtcacttcccttctctgggcctccgttttctcatctataaatgtgagctaagagtaggagaagctctgggaatgtcatagcattcccagtggggaactgatgtccgatgaatcatgcagtggtgacttcattggtgacagtgacctcattcttttggcccacagagttgccaaaactgactgccaggaatacttagagctctggagctgatcccacttggtgtatatgtgggatggggaggggggctatccagaatgcccccctgtcagcccatgaatgccttagctggaagcaccaatcagaccgcaacagaaacctcactttcccatgagcaaagaagataatgtccaagtggtaaaaaaaaaaaaaaaaaaaaaaaaaaagttacagaaaaagctctcaaatttcagggattggagatagaaagcactttgtttctgagcgtcccataggctgtctgcttgcttctctccttttatttgtgcaaatgttgaaacagacacaggtctgtgtgagaacagtgaaatttctttttctttttctttctttttttttttttttttgagatagggtcttgctctgtctctctgtcactctgtcgctcaggctggagtgcaaaggcatgatcttggctcactgcaacctctgcctccctggttcaagtgattctccagcctcagcctccaagtagctgggattacaggcatgtgccatcatgcctagctaatttttgtatttttttgcagagcggggtttcgccacgttgcccaggctagtctcgaactcctgagttcaaagtgatscgcctgcctcagcctcccaaagttctgggcttacaggtcactgcatctggctgagaacagtgaaattcctaatcagccttctcttactctttttcctgtactccctccttcctctcatacttaattcattccatatttcaattaacaagcatttattgaggtctgttagatgccagattttattcctgggctggggacaaagagctggaaagccacagtcacttctagctaaaccattcaaggaacttattagcaaacaggaaagcactytatagtgtgagcagtgctgtgctagagaatagagaataggcttctggaggtgcagaggaggcaattagtacataggtccaggtgtgttgaggaaggatttgcagaagtgatgtcattgacctggggcttaagagtctaatgggagtaaggtaagaatgcctgggaaaggccaagagcactgcatcaaagcaagaaggaacagcacacaacttcctgggaatggtgaggcatgtaaggtggacagagtgcatgattagtggtgctggggaactggtttgtatttaattgggaaccatataatgcaggcagtccatgagcttctgaaagccatatgaagaatgcagggtctggcatgggttgggcagtctccactgtacaaaggccaaaggccagggccaatggggccactgaggaagaaatctgacccacacgcttactacaaaggcatggtcccagctcaaggctgcgttcattgcaagaagggcacttttttcttaccacaaatgtgacttctgtttgtcaaaccctgtgcccataggggtgcatccactcagaggggaaccttggtctatgtagcaaaagatgaaggcactgtctaggcaagcagtggttctgggagygaggatgtaatgaagggaataaacacaaatttctagagcatctgctgtatactgtatccagttatggtcccgggtatttggtgctcattgatataggacatcttatttcatcccccaaacaaccttgtaaactttgtagagagtatctattggtttgtctatccagaacagcaccatttgcttctgctaaatgtttttataatgtaatctctgtaatcggttaaatggaagctgccgtcttcttatacatcctgcccctggtacctgttgatccctaggtggacacctgattcaagatgggacaattagaactctttcctgaatttttttttgtgtgtgtttttgagacagagtctcactctgtcacccaggctggaatgcagtggtgcagtctcagctcactatagcctcaacctcccaggctcaagcaattctctcacctcagcctcccaagaagctgggattataggcatgagccaccaagccttgcctgagaattttgaatttgggattcacagcaggagtttctcctcttttgctaactaaactgagcgatgtgagcctggaagctgtaggtcatttatgtttcagccattcacaaagtagccagtccaaggaaatatagctaaagtgcagagagaagcaaagagagagagagaacaccaccaccaccaccaccaccactactcccccatcacaaagggcagagagtaaacaggccatctgtgagttactaatttgcatcacccccgagatcctgttgcacaactgttctctgatttgtcatttgagttaataaatcttccccttttttttttgcccagtgagtaggggttagttttctgtaactggtaaccaaaggaatcctattataatattatatctatagttcacattagatgatgagattaagaagcttgccccagatcacacagctggtaagtggcagagctaggtttcaaaatcatctctcttcaaagctaatgcatttgccatattccacattgacaaggtatcaaaagtttttgagtaaaaaaatgacaagcttggacctgtcatttgggaaggtcactctgagactcatagaaaatggatttggaaaggataagggtgaaggcagaaagagccaggaggagacagatcacaacagtctgacccaagcatggcagtgaacatgaagaggaggcagtgggtttcagggagatttggatgatggaatccacagggcttggtagcagtgtggggatgtggggatgacagaggaggcgagagagaacaaggtttttacgataactctgaggcatctacattatgatttcatctacttttttttttctttttaatgtcctctgttgttatcttcccacttcttctttggacttcttccttgctttttgagcctttccatctccgattgtttcctaaccacgcaactgactgtctaaatcaagctgagattagaactctagaggacagtatgttctaaaacacattcatttgcatcattttgtgtgttccctcatgtctgcttaggaaatggaaaaatggactccaagggatcatttggtgttgtggctaggatgctttaggttgcaagtcatagaaaattcaactcgaaccagcttcagcaatgagggaagtgtatggacttctgttatggaaaaatccagaagcagtccaagcttcaggcatgaattgatcagaactctttttttttttttytgcacatctctcagtttttcttcttctctatgagtcaactttctactcagcataccttctttcctggaagcaaaatggttgcaccaagtccaggcatcaccatccatataccatgttttccagaaggaaagagagcttctcttgacccactcattgaacaaagtcttgaacttcttctgattagctcaacttagttcatccctgaaccagtcatggtgggtagtaaactgtcaggtgactgttgccttaggcctgggctactgtccatccctaaaaccatcactatggcaaggagttgggactatcctaattgggcatatcagccctgcccccacaggggctggggtttcacacctacccaggttctgtggtttctgcacagtgggtgacaagtctgggggaatgcatgctgaggaggcaaccagcaatatacatctacattattgcctaagggtcaacgttcctaggccttcccctggctacactggaaataaagaattttaggagaggccaggcaaagtggcttatacctgtaatcccagcactttgggaggccgagatgggaggatcagttgaggtcaggagtttgagaccagcctggccaacatggtgaaaccccatctccgctaaaaatacaaaaattagccaggcgtggtggcgggtgcctgtaatcccagctactcgggaggctgaggcaggagaatcacttgaaacgggaggcagaggttgcaatgagctgagatggtgccactgcactccaggctgggcgccagagcaagacactgtctcaaaaaaaaaaaaaagaagtttaggagagaggcaaatgttaagrggagaggaagatgagatggctccaaatctaatctgtgatttgttccaaatttcaggtggattgtcaatacaggagtccatactgactgaatccctaattttggcctgtattcttctccctctgtgaaccatcttcttagaagtcactggtaaggagataaaatgatgggcattctttaacactggtgctgccctgctgttatgttatgcttcttcccaccacaatgcccagaatcctcacactgcagcctcttcactccccagggtgcctgttggccttccctgcagcatcctgccacatgccctacctayccctatccctatttttctccctgccactaaaacctcccattggcaccctcttctctttgcactccagtgtaggtacactgcaatgagttaaacaccacagcaatttcttaaaggtcactggttcctaatgatcacgctgataaataaatccagtaggattggtttgcctggttttcattcccagttagaatgtacwtagatctctttttctagytgattacataccagaaactcagaagaatggcccagcctctgagaacttcggctcaagcgctcttaatgttttgccattttcatttctaactgttttctgctgcaacctaaggtcaggagactagtcattgtgactgatggcatcascacccattgctgaactataggaaaggacatttccttagaggttgctggtatggaatactcatatgatttaggagtggtctcctctcataggctccaaaggaggctagatcacagatccctcctccaaaaatgaaattaatgattttattttatgtttcagaaccaagagtgccagaaaaccatcccaagactcacacagagttgttcttccatagtggatgttttggccactggacatcagaaccacattttgggtttgaagaatcttctacatggtgagccttggtgggaagaaaagaatatcccttccttatagaagctgaaattacagactcttgctttccttgtcagacttaaaagctagtgtagccagagttaaatacagggcacattgtctctggaggctgcagctttagtggtgggtacacagttcagttcctgacccaggaagtggcacatcagggcaggcagtggtgttggttgtggtataattgagttcctggttcagaagtgacaactgtacacatgagttgtctagggtttggtgaaagcaatggtattgaaagtggttttctcatcaaattagttcctgagtcatgtgtcggacactgtttctatcttgagcagcttytctagcctttctaaatcctgtgacctgcctgtgatccttttaagatttctttctgtttaatyagccacaaacagcttctgttgcttgcaacccaggctcctgagaagagactggagaagcagatcactttattaatgtgcttcatgtagagggagtagagatttccacctctaccatacccaaataactggtattggctgtacctttctaatgtgagcaactttaaaattgaacagaatatatgaaacctctcttttcagacattgaacagcatgtagcacagcaccgtgattcctgaaagtagggaacaaatggggcaaaccctatcactctaactttctgctgaaaaatgctgtctaaattgcagcacaatgagggggaacccaagcagagcatagtggtcttgctgagttgaggagatagttgagcagacttttcaaggcagagtatcagaaaggagagaatataacagcaaaacaggctcctggaatccctgtgaatctgttgctgaatactaagctgcacatgcataaggtgaaacttcacagtgcgatgcaaagaactacygcggagctgtgagctgattggttcccagggctcactgggcaatgtttgagtttcaactcgccaatgtgaagaaaccttgctgactgtccagggaattcagtagaaatcccaaaagggtaaggcattaggagaagggctaactaagccgaaaagtgaggtaactctagacttcctccaacaaggtttagaaagcagcctcaaaaagaggaagttcatccgctactaccgtaactgccagccaaaacaaattttaccatttttaaaacaacaaaatacagacatttaacaacattaaattcagaatgttaaaaatactagatatgcaaataagtaggcaaatagaacccaaaatcaggagaaaaatcatttaatagaaacaaaccccaaaatgacagagataataacgttagcagacaaggacttaaaaaattaaaataaaacaaggatttaaaggaaaacatgaacatagtgaagaaaaaactggaagatatagaaaataaccaaatggaacttctggagctaaaaaatacaacacctgtaatgaataattcagtggctgaacttaacagtaggttagacattgtggaatgaaatatctgtgacactgaagacatagcaatagaaactgtcccaattaaagcagagagaaaggaaacaaaagaaacacagaaacacagagcctcagtcaccttaagatgatattaaaaactggagtcctcgaaaaggattaacggtgatgatttgaaggccaaaaacaagtcccaaatttcatgaaaattgtaaacgtatagcgccaagaagctcaacaaatccaaagtaggagaaaaacaaagcaaaccatatcaagtgaggcactttgtaattaaatcactgaaaaccagtaataagtagaaaaaaattaaaagcagaaagagaaaaaaagacacattttatacagggaacaaagacagatataattgcagacttctcttcagaaataatgcaaactagaacttaatgaaatcgcgtctttaaagtgataaaagaaaaagaaagcactgtcaatctagaattctatatccaccagaaatattctgtaaaattgaaggtaaaataaatgtttgtcagacaacaaaaggcttaaagttttttttaaaccagaagatcttcaatacaagaaatacaaaataaagttcccgaggcagaaaaaacatggtaccacatgaaaccactgacctacacaaagaaatgaagagcaccagaaatggtaaatatatggrtaaatatgagacatttctttctctgttacaaaattcctttaaaacataattgaccttggccgggtatggtggctcacacctgtaatcccagaacttttggaggctgaggcaggtatattgcttgagctggagagtttaagaccagcctaggcaacatggcaaaaccccatctctacaaaaaatacaaaaatatagttgggtgtggtggcacactcctatagtcccagctactcaggtggctgaggtggaaagatcacttgagcccaggagttcaaggctgcatgagctgagatcatgccactgcactccagtctgagtgatagagccagaccatgtctcaaaaaaacaaaacaaaacaaaaaaaccccaaaccatctatctatctatctatctatctatctatcttctatctatctatctacacatacatgcacacactatatatgatataacattatatataatgttagatatataatatgttaggtatataatataacgttagatatataatataatgttagatatataatgttagatatatatatataattaaaaaaataaaaaacacaattgaccatctaaggcaaaactaatagcagtatattacatggtttataacatgtagaaatagaacctataacaataataacaaaagggatagaaaaacagaaatagaactatattcttataaaatccttacattgcgcattaaatgatatagtgttatctgaaggttgtcttagtctcttcctgctgtcatagcaatctaccatagactgggtcattcataaataataaaagttcatttctcttagttctagaggctgggaagtctaagatcaaggaatcagcagatttggcatctggtgagggctcacgctctgcttccaagatggcattttgttgctgcatgctccagagggaaaggaacaaacactatgacctcacatggtagaagggaaaagggggttaaaacaaacaacaaaaaactcttaagcccttttataagggcactaatcccatccatgagggctctccccttccaaattacctcccaaagtttccacctcttaatactatcaccttggggtttaagttccaacataaattttggaaggacacatacattcaaactataacaaaggtagactaagaaaacttaaagatgcatgttgtaaaacctagagcaatcactataaataaataaatacatacataaatacataaataaagcaaagaggtctttttaataagccaacagtaaagacaaagtggaataccaaaaaaaaaaaaaaaatcaaaaaggaagtcaggagggtgccaagatcattcartggtcttaggaaaacagtagtctcttcaataaatggtgatgagacaaactagatatccacaagcaaaagaatgagtctggatctttccctctcaacatatacagacatttactcaaaatgaattgacaaccaaaagacatgagctaagaccataaacttttaggagaaaacctagggatagatcaacagtttcttatatatgatgtcaaaagcataacaacaaaagtaaaaccaaaactggacttcataaaaattacaaaacttttctgcttcaaaggacattatcaagaaagtgaaaagacagcatacagaatgagagaaartacttacaaattaaatagctcataagactctagcatccagaatgtataaagttctcttatcattcaacaataaaatgacaaatagtttatttttttaaaggggcaaaagacttgaacagacatttctccaaacaagatataaatcaccaacaagcacatgaaaaggtattcaacatcattagtagttagtcattaggtaaatgtaaataaaaacctcaatgaggtacccctttacacccactaggatggctataattaggggtgggggaaggaaaataagtgttggtgaagatgtgaagaaattggaaccctttagattgctggtgggaacgtaaaatggttcaacctctggaaaaccgttcgaaggtctttgaaaaagttaattacagaattacaatatgacccagcaattctagagctaggtatatatccaaaagaattgaaaacacatcctcaaataaatacatgtgcataccatgttcacagtggcactattcccagtagccaaaaggtgaagacagctcaaatgtttatcaactggtgaatggataaattgtggtatatggatacagtggaatattattgagccataaaaagtaatgaagtactgacagctgctacaatgtggatgaatctcaaaaacgttatgctaagtgaaagtagccagacacaaaatgctatatgttgtatgtttccatttacatgaaatatccagaacaggtaaattcatagacagaatgtaagttggtggttgctatgggctggggatggtagggtttgaagggaaaatgaggagcaactgcttaatgaatatgaggtttccttttggagtgataaaagtgttttgaagctagatagaggcaatggttgtacaaccttgtgaatgtaataaatgctactgaaatattactttaaattcacctcaatttcaaaaaaacgtattcaccaaccaagagaaaaaaagtcaggtaatatggtttggctgtgtcctcacccaaatctcatcttgaattgtagctcccataattcccacgtgccacgggaggggcccggtgggaagtaactgaatcatgggcttgggtttttcctgtgctgttcttgcgctagtgaataagtctcatgagatctgatggttttacaaaggggagttcccctgtacaagctttctcttgcctgctgccatgtaagacgtgtcttgcttcccctttgctttctgccatgattgtaaggcctccccagacatgctgaactgtgagtcaatgaaacctctttcctttatatattacccagtcctggttatgtctttattcgcagtgtgagaacaaactaatacatcaggaaaagaggaaaaaaggaagaaagaatagctggttacaatggaaaacaaatagcaagataaaagacttaaatccagccatactgataattatatcatatataataacacttgaggagagtgcagggcaggtggccagggaaagcgggtaataatgagaacctttgtgtttgaagacctaaatgacaaactgtttgacctctgaaatgaatattggagaagggaggaggatgatggttcttggttcctgagaggtggatgcctgacctaccctgagatagtggcagaattgggggcatgaccaccccacccaccaccatcatccctttactgtgcacaggcctgaacctcttctcagcttctgttcagcccagtgcttctctcctggcgccatcctggtgtctcacatgctgtagggaccagggaatcctggggctggaagaggagagggctctgtatgtaggtggtaggagactgagctgcattctggagatgtgcagttgtggcctgaattgagtgatcctgagaccttcagttaaaggtgggaatttccagcagatgccttacagtcagggatatccttcaaccccctttgcaacaatgtaacaggacaggttataaatatactgaaataatttctttctggttcgaaaacatttcctaccctgagctccctgagtgccctgatcaggccactgcatcaccctgacgttcatcatctttgtacccccatctccttcaactcgaagaaggttgcaaattcctaagattgttgagagtctattggggaaactacttcctcaccacccaaatcattcatccatgggttcaataaattgttattattattattattatyatcatcatcatcatcattaaagacagatgtcactctgttacccaggctggagtgcagtggcacaatcacggctcactgcagcctcaaatgcctgggctctagtgatcctcccgcctcagcttcctgagtagctgagaccataggtgcacaccatcatgcctagctcatttttaaaattttttgtagagatggggtcttgctatgtttcccaggctggtctcaaactcctggcctcaagcaatcctcctgccttggccttccaaagcactgggattacaggcgtgagccaccacacccagccaaatcattattaagctactgctatgtactagactctgtgggcagggttgagatgagtgcagagtgggtcagaaatagtcctcttcccaagaagatcactgaggaagcccctaggcatggtgagggacagcactgaatgggtacagtcttttccttgcaaaccagtaccttccctgcattataggttgagctgtgtctaacagcaaatgtgaggccagccaggacttgtcatggtgagaattaagtcagtatcatagcagtgttgggcatctgaatgtgtaactcaaggctgaggactagtagacactgcttctggtgttcctgccctccctcttggggctgtccctacccacgacttacaggttggatggaggcttgggcagccagctgcctctgaagggctatttcccagggctccttgctgacttcatacctacccttggcccctctggaggctgcctggggctctgacctccagcctgggccaacttctccataggcagctctaggagtatggttctaggaagggcagaatgaggggctctgggaacccatgggcagggaaagacaaacccatgggctttgtgaaagacagcatctgatatttctctctcactttacaaaacttgtttgcttcttccactattcggccttctcagctccactgtgaggacaacagaactcttcatcaacatcctggttttacagaagtagttttgtgtctctaggtgaattgaggcagattgtcagcctttatccagattgcccaacctacgagtagcatcaggactggggtctgaacctctgatgcccagtcctggatgcatcttgtgacaccaagcggctgcccatggagcctccaaggcagagggagacctcctgttccaggggcagcctggtttccaccctcatgaggcgggagaagggagtcctgccctggaggagtcaccatcctgtgatgtcccatgtctacccagcatgtgggcatgcccactaactattaaccatataaactgctcatatgccatgcagccagactctcagatcactaccaccaccctgttcccaccttcaaagagggctattttggggggtgaatactttgacaagtggattgagtgggtacatgagaccttccaagatcttcttaagtaacaactgatggttgcttcactgctttctaagaagggtgaatttatttaacttgtagtgcagtgtttctcaaatattttgtcctgcaaattgcagttaacaaatacatttttcattgtaaactggaatacatacacatacatatattatgtttgtgtgtgtgcacatatatctatacatataacaaaaggtttgatataacaatacttaaccttaccacctgtaatgaattctggatttttgattctatttggtttcatttctttttattcagtgatgatccagtaaatgatttcatagtccaccaaacggtcacggttcacacttggagacacccaatgcaggtctctgctggctgagtgcactggcttgtggctggaggtgagtgctcaggaccacagagggataaagaacctctataactcaacaacaacaaaaaaacaaacaacctgattttaaaaatgggcaaagaacttgagtagacagtttccaaagaagataagcaaatggccaataagtgcatgaaaagatgcttaatatcacttatcattagggaaatgcaaatcaaaaccacaatgataccacaatgggtaatttcatatccattaggatggctattatttaaaaacaaaaaacaacaacaacaacaaacccaggaccaggcgtggtggctcacacctgtaatcccagcactttgggaggctgaaggggaggatcacttgaggccaaaagttcaagaccagcctgggcaacaaagtgagactccttcctctacaaaaaaatttaaaaattagttggactagccgggcgcggtagctcccgcctgtaatcccagcactttgggaggccaaggtgggcagatcacgaggtcaggagatcgagaccatcctggctaacatggtgaaaccctgtctctactaaaaatacaaaaaattagccgggcatggtggcaggtgcctgtagtcccagccactcgagaggctgaggcaggagaatggcgtgaacccggtaggcagagcttgcagtgagctgagatcacgccactgcactccagcctgggcgacagagtgagactctgtctcaaaaataaataaataaataaaaattagacacgatggtgtgcacctgtagtcccagctactcaggaggctgaagtgggaagattgcttgagccaggagtttgaggctgcagtgagctatgatcatgccactacactccaacctgggcaacagagccaagacacaaaagaaagaaaaaaaacaaaaacaaaaccagaaaacagcaagtactggcaaagatgtggaaacactggaacccatgtgcattgctgtgaactgtaaaatagtgcggctgccggggaaaatggtgcagatgttcttcaaaacactgagcttagaactactatatgatccagcaattctacttctaggcatataccccaaagaagtgaaagcaggtctttgaacagatatttatatacccatgttcatagcagcattattcacaacagccaagaaaggagagcaccccaagtctctatgaatggatgaatagacaaaatatggtatatacacacaatgaaatatccagccataaaaaggaaggaaattctgacctgtgctacaacatggggaatcctgaagacatcatactaagtgaaataagccagccaaggaaggacaaatattatgattctatttatatgaggtacctggagtactcaaattcacagagacaggaagtagaatggtggttgccaacagttacttggggaagagtatgtgggattagtgtttaatggatacagagtttaaatttgggaagacgaaaaagttctggagatggtggtgatagttgcaaaaccatgtgaatattcttaatgctacataaatgtacacttaaaaaggcagggtgtggtggttcacacctgtaatcccagcactttgggaggctgaggcaggtggatcactgaaggtccaggagttcaagaccagtctggctaacatggtgaaaacccatctctactacaaatacataattagccaggcatggtgatgcacgcctgtagtcccagctactcgggaggctgaggcacaagaattacttgaacccaggaggcgggggttgtagtgagccgagatcacaccaccgcactccagcctgggcaacaagagtgaaactccgtctcaaaataataataataataaataatgtacacttaaaaatggttaaatggcaaaatttgttatgtacattttactacaataaaacaaaaaaggtttcacttttaaaacaggatttccaacttctctaaaaaatcagatcttatgacatcctagtccacattttctaaggcaacagaccggggaagtatttgcccctttagacagggatggaaatgaagggcttttttttttttttggagaaactgccactggaaacttctagatatgcagctttgaagcaaatgactcttggggagaacctgactgctttgaagtaagctgtctgcagatgttttagaaggagaaattcagttgtgaattcttcatgtaaattattttgggagaaaggtttcttcccctgcctgtaggcattagctttctccagtcctgaccaaagcctgctttgccagtgtgagtggagttcttggaataaaactctatgtggctccttactcatcagcaactgaagcagagatgaagcttttcaggcccttctgattttctctccaggtgtctcctgttacttctagaccaaatgaactctctcgcccttgccttctctcccaagcttgctcgccagggagcagggtgcctgtccctgctttcttttttttttttctttttttttttttttgagacggagtctcgttctgtcgcccaggcgggagtgctgtggcgcgatctcggctcactgcaagctccgccttccgggttcacgccattctcctgcctcagcctcccgagtagctgggactacaggcgcccgccactgcgcccggctaattttttgaatttttagtagagacggggtttcaccgtggtctcgatctcctgacctcgtgatccgcccgcctcggcctcccaaagtactgggattacaggcgtgagccaccgcgcccggccgcctgtccctgctttctcacaacctcaccccaagctgagctgctctgttctgtgtagccagaggctgagtcctcagacctgacacccaacagcttgtgggccacatctcttccttccaatcgcgatgccttgtcttgtgtcctggccctcgctgtgtacaggctccctctggcttttggcatatagtccaagactcctgcccccaccacccccaggctgatcttcctgagtccaggtttggcgaaggtacagccctgctaagaagcctttgatgggctcttttgcataatgccccaactctcaggcagacatttccaccctttcccattcacaccccagtgtctttctagacattgtcctctgcaagtctcttgactactgccaaacccacctgctctccacacgcagacctcagacccctttccaccagcaggcctttgcccgcagtgttctccccatccagtgtcttactttctttctgcttatgatgacggtccatctctcagcgcccatccttactactccctccctgactggccccttgcccacagggctgctacctcggctgaagtgtgcagtcactctggctgtgtcctttcctgccccttatcccatcccattttgagtgccagatgcttttctcctattttaaaccagggccctctctgaaaccacaaggcattgcttaaagttgggtctccataaagatgtgattgatttttgtctatttggataaattctgcttaataaatactaccaactttctacattttccaggtgacttgcctccaagttaaggtactatgttgatgtgccctgaaacctcattttcttgtctgagttttccgaaattgccttatgttctttcatgtatcttcatttccctccctccctattggtgttctgttgttacccatggaaggtctcaaaccatcccctacctggtttaaacatcttcaggtcaacaatacattataaagtgtattcaaataggaagagaggaagtcaagttgctgtttgcagacgacatgattttatatttacaaaaccccatcatctcagcccaaaaacttgtcgaattgataagcaacttcagcaaaatctcaggatacaaaatcaatgtgcaaaaacacaagtattcctttacactaacaataggcaagcagagagccaaatcatgaatgaactcccattcacaatcgctacaaagagaataaaatacctaggaacacagctaacaagggatgtgaaggacctcttcaaggaaaactacaaaccactgctcaaggaataagagaggacacaaacaaatggaaaaacattccattctcatggataggaagaatcaatatcatgaaaatgcccatactgcccaaagtaatttatagattcagtgctattcccattaaactaccattgacattcttcacagaattaaaaaaaaactattttaaattttatatggaatcaaagaagaccccatatagccaagataatcctaagcaaaaagaaccaagctggaggcatcacactacctgacttcaaactatgctacaaggctacagtaaccaaaacggcatggtactggtaccaaaacagacatataggccaatggagcagagacctcagaaataacatcgcacatctacaaccatctgatcttcgaaaaacctgacaaaaacaagcaatggggaaaggatctcctattcagtaagtgatgctgggaaaactgactagccatatgcagaaaactgaaactggaccccttccttacaccttatgtaaaaattaacttgagatggattaaagacttaaatgtaaaaccccaaaccataaaaaccctagaagaaaacctaggcaatacaatttaggacataggaatgggcaaagacttcatgacaaaaatgccaaaagcaattgcaacaagagccaaaattcacaaatgggatctaattaaactaaagagcttctgcacagcaaaagaaactatcatcagagtgaacaggcaacctacagaatgggagaaaattttttcaatctactcacctgacaaaggtctaatatccagaatttacgaggaacttaaacatatttacaattaaaaaaaaacatcaaaaagtgggcaaaggatatgaacagacatttctcaaaagaagacatttacatggccaatgaacatatgaaaaaaagctgaatatcactgatcttcaaagaaatgcaaatcaaaaccacaatgagataccatctcatgccagtcagaatggcaattattaaaaagtcaggaaacaatagatgccagtgaggccgtagagaaataggaacacttttacactgttggtgggaatgtcaattagttcaaccattgtaagaagacagtgtggcaattcctcaaggatctagaaccagaaatagcatttgacccagcaattcaattactgggtatatacccaaaagattataaatcattctactataaagacacatgcacatgtatgtttattgcagcactaattataaagcaaagacttggaaccaacccaaatgcccatcagtgatagattggataaagaaaatgtagtacatacacaccatggaatactatgcagccataaaaaggaatgagatcatatcctttacaggggcatggatgaagctggaagccatcatcctcagcaaagtaatgcaggaatagaaaaccaaacactgcatgttctcactcatagtggaagttgaacattgagaacacatggacacagggaggggaacatcacacaccagggctttttggggggtgggggttaggggaggaaacttacaggatgggtcaataagtgcagcaaaccactatgacacacgtatacctgtgtaacaaacctgcacgttctgccattatcctttttttttttttggagacagagtctccgtctgtcgcccaggctggagtgcaatggcacggtcttggttcactgcaacctcgacctctcaagcaatcctcccacttcagcctcccacgtagctaggaccacaggcgcacaccatcattcctggctaattaaaaaaaaaaatttgtagagatgtggtcccactgtgatgcccactgtgaactcctgggctcaagcaatcctctacctctgcctcccaaaatgttgggattacaggcataagccacctcacccagccaaaaaatactttttgaaagacagggcctggcgcagtggctcacacctgtaatcccagcactttgggaggctgaggcgggtggatcacgaggtcaggagatcgagaccatcctggctaacacagtga

SEQ ID NO: 97406 - DNA, 14325 bp, Homo sapiens
  misc_feature (1)...(14325): n = A,T,C or G
cacccctggcccaaaaattgctcattcttttaggaaactctggatctcctggtgaccccaaattttaaataacttgtctaagggtttttctggttccttgatttcattttcctcttttacttcctggaggtttttagtagtttcaatctgaagtctcactctctccattcttcttcccgagttttctcctgggattctttctgctgcagccatagggcctaacccagggtccgcagagaaccagcttttacttcctttgccctagtggaacccatgagagtcagaaggtgcccaagtgtggaaacctgtgtgctgctctctgctgggagtctgttagtttgatttttatatgatgcttttatatttcaaataagaatacacactagtttatcgttatccattaagaagaatcactttgagaattcactttatacttttattttcttttgtactgttttgaaacagaaatgtaggcattagacttcctgggcggcagacaaaccaaagagcggaaattcatgtaagttatcagatacgtttaagcctctcttttttgagcattgagtatgaaattatcaaataaactaattctttttttttctacctatacatataagatatttgaagagagacgggtttaataacaattttgaaaaataggaattttgtagaaaaattctaaaaacttatttcaaatagatgtctacacaggagaattgtatgtatagtagtgtttcatacagagaatataatcagtacagaggggatgtttcaatttcgaagtacttttgaactttagtaatgtcagagttgaacattttctgtagcatgactatcgacttgtcttttcaaggcagcctgcaaagccattgaacaagcaaagactcaaaacatcaataaactggttctgtatacagacagtatgtttacgataaatggtaagctttcacatttgatttcttctgtttttccagtaactgtgaagggaaattggtaggaggtgttgtaacagggcaggacccaaatgggaacggggggatgacattggtttgtcaggtaccgagcaaagagtgaggattttggagtctcccttctgctgctctgatgttttccacatgcttatttctttgccaggcactggagatgcagtcagaagtggaagtggctcttacttctagtctgtgtgtgtataagtcacttaagatggcgtgttgactgcttctttgggaaatgccctgaataggagcatgtaggggatgcttacgaggctggggaaggctcctgggagaaatgacatcttaagctgacagctgtaggtagaatacaagttaggggaaagggaagagaggagggtatttcaggctgtgccaaaggccaaagcaactaaggccagctaaggaagtgaagagtcaaggatggtgactcagaatacaagtgggatcaattataagaggtaagactaaggaggtgaaaaaggcaggacactcaagattgactcaccagtgatcgtgcatttttgtaggtataactaactgggttcaaggttggaagaaaaatgggtggaagacaagtgcagggaaagaggtgatcaacaaagaggactttgtggcactggagaggcttacccaggggatggacattcagtgggtgagtatcttaaatgttcatgtcctatggccattatgaccaaataagctaagtttactagagattaatggtttatgtaagtggtttaatgacataacaatttccatgatattaatatcataatgtatattacaacgtatttgaggctgggcgtagtggctcacgcctataatcccagcactttgggaggctgaggtgggtggatcacgaggtcaggagttcaagaccagcctggccagtatggtgaaaccccatctttattaaaaaatacaaaaattagccgggcatggtggtgtgtgcctgtagtcccagctactcaggaggctgaggcaggagaatcacttgaacccaggaggcggaagttgcagtgagctgagatcgcgccactgcactccagcttgagcaacgatatgagactccaagaccccgtctcaaaaaaaaaaaaaaaatatgtgagcctgggctcagtggttcacatctgtaacccagcactttaggaggcccaaatggcctgactacttaagccaagaagttcgagaccagcctggataacatggggagactctgtttctcgaaaaaataaaaaattagccaggggtagtggcacatgcctgtagtctagttactcaggacactgaggtgggagaatgacttgagctggggaggtcgaggttgcagtgagccaagattgtaccactgtactctagcctgggcgacagagtgagaccctgtctcagaaaaacaaaacaaacccacccacatacacaaatttgattattttccttatcatacaagtaatacagttttttggtttggtttttgagacaggtctcactctgtcaccccaggctatggcgtgatctcattgcaacctctgccttctgggttcaagtgattctcgtgcctcagcctcccaagtatctgggattacaggcatatgccaccacgcctggctaatttttgtatttttagtagcgatggagttttgtcatgttacccaggctggtcttgaactcttgatctcaaacattccacctgccttggcctctcaaagtgctgggattacatttgttttgtgtcacttcctatatgtttttgttttatgacaaaaaggtttacaactaaatcaataatcatgtcaaacttttttttattgttttgagatggagtctcgcactgttgcccaggctggagtgcagtggcgcaatctcggctcgctgcaaccacaagtaatacaattctagtgagagtgtcactaggcatagaatacacaggcagtgtggtttgagggatgttctacaatccttatattttgttaagaacacgaagtaacacccaacctgggcacatggcattactatgacagctgtatgtcaccctgttcatttctttggaatgcatcataatgttaaataaaactatcagtgtattttgtttcaaacaatagtaaggttgtatgattaaagccttggtaatagaacttttattccaagatggaagcactttttaaaatcatagatcatgtttattaaaaagtttttttcaagcaatagagaacaaattacactgcagccactgtctcaaccctgccttgttctgccttcctggaaccactgataatagtttggtagcctgatgtgtaaatttgctttggcaacataaatgtaaacagtggttaaataagtacattatttctgacagcactgcaagggaagcgtgtgtgtgtgttgcatacatatccgtccacccatctgtacatacatgtgttttgcctggaaagcttatcaagtcccattgataagtggggaggaaatagcaacatgaacggtaaaatccaatttgtgaaaaaacaaaatggaatgttcgtaaatcacatccattgcgtaaacgcatgaagaatggacagcgtgctgttgaggatcatgtctggggagaggagcgttgaagttgagcttatgctgtgcagtctgttctgaatggttttttatgatgacaatatagtcatgtgttgcttatgtaaagatgagtaaaaataaaaggaaaacatttatcttaacagatgcatgttcctggtcattcgggatttataggcaatgaagaagctgacagattagccagagaaggagctaaacaatcggaagactgagccatgtgactttagtccttgggagaacttgagccagcggctgtcttgctgcctgtacttactggtgtggaaaatagcctgcaggtaggaccattgcagtgatgggcagatgcgtctttcacacggaatcaggcacagtggccttctgtgacatgtgtttataaaaaatggttaagtatataataaattgaacatctttgagattggagaattatgtgagatttccacattatgtttactgggttcaatactgtccttgcttgttttattgcaggcaagcaaggcaaatggcctaaaatgctgtggcttatattttgataagaaatcaaaaaaccattggttaaaagatgcaactcagaagtctggaagtattctgaaagcatccatttaccgtccagttgacaggtttgagtctcctgcttgtataggtgacttgtgcccatgggtacattaaaggaacatgctgcccagggcctgggcggacagctcagtgggcaggatgtgtgctgggtctcagccccatgtgcctgcttgctgggcagttagtatagggcaaagcctgcctgcggcgaccctggctgctaggccattctctaggaacagctgcgactcataaagaccaagaagcataaataaactttcaaaaatttatttggctctttcgttaaaaactgtgcaaattaaaaaaaaaaaaaaaaaagtaagacaccggctgggcacagtggctcacttctgtaatcctagcactttgggaggccaaggcgggcagatcacttgaggtcaggagtttgagaccagcttggccaacatgacgaaaccctgtctctactaaaattacaaaaattatccaggtgtggtggcacgggcttgtagtcccagctacttgggaggctgaggcacaagaatcacttgaacccaggcggcagaggttgcagtgagccaagattgcaccactgcactccatcctgggcaacagagtgagactctgtctcaaaaaaaaaaaaaagtagtaaaagtttgacatgattatttatttagttttaaacctttttattataaaaacatacaggaagtgacacaaaacaaatgtatagcttattgaatgattatgattgtaaggtgaataacctttgtgtccaccacctggtgaagaaatagtactttgccagataccccaggaggctctcccaagtgcccctccagccacagccctcttcttctccccctccttgccccaacaagtaatcctgacttttacagaaatgactttcttggttttttgatggcagtttagtcttgtctgcttttttttgtttatttttttatctacttcagtgtccatttgcagtcccgtcggcctcactgttttccctgccgtttatctgttgaagagcctgggctgtttgtcccatggcttcccacagtgtagattttgctgaccacgtggtcatggtgtagttcagcatggtcctctatgtttcctgcacattggcagctgggtccagaggcttgatgagcctcaaatttgatccctttggcaggagaacaggcggttaggagctttcctcaggaaagtaccatgttgacggcagctgatgctcagtgccaagatccattaattatttggggttgcaaaatggtggtattctcattctgtcgttttgcttgcctttattagctggaatggttttctaagaaagtgttttcttttttatacttatctggttacccagtggtacagttcatataggaagggcaggataaatgcttgattctttgctcttgtacactaagtttttaagataatgcattagttgtctgtcaaggaaggtgagtggtgaagggtttttacatatatacaagaattcatgggctgggcatggtgtcttatgcctgtaatcccagcactttgggaggctgaggctggaggatcacatgaacccaggagtttgagactagtctgggcaacatagtgacaccctgtctctacagaaaattaaaataaaatcaggtgggtgtggtagtgcctgcctgttgtcccagctattctggaggctgagatgggaggatcgcttgggcccaggaggtcgaggatgcgtgagctgtgaccatgccaccacattccagcctgggcgacagcaagtccttgtcttaaaaaaaaaaaagaatttgtggagttaagcatacttggtgggtttcaatccgttgtgatttttatctttatttagctcagactagcttattcggtcagtgagagggagcctcttcagcttggctcttgctttcttttgataagtgtgcacatgtgtgcatacatgtgtgcacagaccacacgcacagtcattgatagctccctgcagcctggcatgtcaagatgctctaggcccaatttatagagcttctgctccaaacctgtcttaaaagaaaaactttagacaagttagcagtttaattgagcagaaaatagtttcttcagctgggtagcactcaggaccaaaagtggttcagaacgttctcctgtgcgttgtgtgcaggctgtatttatttatagccacaggaagggaaagacacatgtacatggccagactgactgcaggtcagcctccacctcacataggcatgttttgggagccttcagcatgtgattggtgagactctgctgcttgttacagaagtgtactctcaagtcaggtcccagtttgcttatacattaagtgaggttataagtcactatgtacagaggcagttttaggccaaacttaattccgtttaacacttggaatccattatttttcccagagtctctggtagagatggtatttcagatccagtttaggatgctcattgctattgcgttggtcattatttctagatttttggacggagctttaaaaaaatacaaacattgcacacacatatttaaaggaagaatattttctgagcctatattgatattcccaatacaaattcagggtcctggggcctttacatagcctcctctatatgatgtctgtgtctcctgcactcggaatcctgcttctcaagacacaggacaatggcatggaatatccatcccttaatcactcacttgttttattcctctttagcatttagcatttaaaaaaaatactaataccatagcattaattgtgatgatgaaaacagcactgtgtctacgttgtcagaaaaattgctcctttttaccaccattgactcatttctgtgtgttcaggtctcataaccagtctatagtcagtgtcatcttggggacagtattccttgagtttctgatgttgaattcagttttgctggatacgaaattcttggcccagattttctttgagtatcttgttttattctgttttcttccagcataaagtgatgcatgaaaagcctgatgaatcttgttttcttcccctgacagtcataygctgtttttccttagatgcccaaaggattttttcctttttctgtcaagtcggccgttttattcgaatgtgtcatgtgttggtattggttgtcctggtccatatttgcaagcgtatggtgtgctctttctatgtgtacttcatatctgttattttaannnnnnnnnnnnnnnnnnnnnnnnnnnnnnnnnnnnnnnnnnnnnnnnnnnnnnnnnnnnnnnnnnnnnnnnnnnnnnnnnnnnnnnnnnnnnnnnnnnnnnnnnnnnnnnnnnnnnnnnnnnnnnnnnnnnnnnnnnnnnnnnnnnnnnnnnnnnnnnnnnnnnnnnnnnnnnnnnnnnnnnnnnnnnnnnnnnnnnnnnnnnnnnnnnnnnnnnnnnnnnnnnnnnnnnnnnnnnnnnnnnnnnnnnnnnnnnnnnnnnnnnnnnnnnnnnnnnnnnnnnnnnnnnnnnnnnnnnnnnnnnnnnnnnnnnnnnntctttctttgtttctttttgagttttaaaagttgttattgtaccacttttgttttgttttgttatttaaaataggaacagtgtctcactgtgttgcccaggctggtcttaaactcctggcctcaagcgatcctccttccttggcctcccaaagtgctgggattacaggtgtgagccaccaaagccggccccaccttgctttttaaaacagctctgttgaggtgtaactgacaggtaatgaactgcacatacgtgaagtgaccgatgcatttgcctgtgaagctgtcgccagaacatgtccatcaccaccaacagcagtttcacaccccggtctaaaccgtccctcgtgtcctccatgttcaggcaaccactggtctgctccctctcactaaaggttaatttatatattctagaattttatctgagtggaatcgcagagcaagtactgtggggggaggtgcttctactcagcataattattttggcattcacccattttgtgtacatcaataatccacattttgtattgcatggatataccacagtttatttatttacctgttgaccgatatttcgattatttccaatttctaaataaaaataaagcaaataaagctgccgtgaacatttatatcctcgtctttgtcttctgtttctcttgggtaaatgccttggaatggaatgcttggtcatatggcaggtgtgtgctctttttttctttttttttttttggagatggagcctcannnnnnnnnnnnnnnnnnnnnnnnnnnnnnnnnnnnnnnnnnnnnnnnnnnnnnnnnnnnnnnnnnnnnnnnnnnnnnnnnnnnnnnnnnnnnnnnnnnnnnnnnnnnnnnnnnnnnnccgagtagctgggactacaggtgcccgccactacacccggctaatttttttgtatttttagtagaggtggggtttcactgtgttagtcaggatggtctcaatctcctgacctcgtgatccgcatgcctcggcctcccaaagtgctgggattacagtgtgagcccagccagctggtgtgtgctttttaagaaactgtgaaacttttccaagtgtgaactttacactttacattccctccagtcaggcaggagagttccagttcactccacatccttgtcaacacttgtcacctcattctgttacaaatgtccataagttttttggttttgctgtttagtagttctgtttttaggtggggatttgagaagattcaaaaagcatgctcctgctgctgcctctgtcttctgagaatctgtgatttaaaaaaaaaaaaattgaaccagaattggaaatagatgaaaagttgtgcctttagaaactttacggtctgtgggattttcacaacacagatgatgttggctgggcgcagtggctcacgcctgtagtcccagcactttgggaagctgaagcaagtggatcacgaggtcaggcgttcaagaccaggctgaccaagatggtaaaaccccatctctactaaaaatacaaaaattacccaggcgcggtggcaggtgcctgtaatcccagctactcgggaggctgaggcaggagaattgcttgaacccaggcggcagaggttgcagtgagccaagattgtgccactgcactccagcctgggcaatagagtgagactctgtctcaaaacaaaaaacaaaagtgatgtcagtacagcagaaagtgcatgaagccggagggaaggaaaggtccaaccacttttaaagaggaatcttaaatttttagggggcaattttttttttattaaaagaaaatatattactgagaatcaaaaaatcagctgcattttttatatctttagaaacttaacaatgatatataattgcatcttcatcagctccaaatcaaaatatttgagtgactgtcatatcagattgtgctacatattgtggaatatataagctttcaactggtgctgctttaataggatgttcgtgccgcacaaatagaggccgttgaagaaatgttctttgtgcagaactcccctcctggtgtctgccggtactggagcgtcacggtgtcaccccattgctgaagcctgaaggtagccactctgccatcttgtaggacaggcacaaaagtgcacgaagccggaggtcaaacaaaacgagaaagaaaaagccctcctggctggtggacagcttgggtaactgtaaataggaaccaatgaaagctgcactcctgatttcaggtgatgttcatttcaagttgagcaagtctgggccacagatgctgtggctgaaaaggagggcctcggggtagatttctggtctttttcctaattctaatattctagtagttctggagcaagaaggaataggtcactcaactaaagccccttttttaataacgtgatgagctgacattcagaactcaggatgtcatcagaacaaaacacgtagcaatgatcgtggtggtcgtggttcctcagttcgtaaacactcaggggtaacatggggagggccggctgcatctgcctgcattgtgtctcctggcacacagaaggcgttgactatgctggccagctcgttcaagcagctttggttcttaattgcccattgagagacaggaattggcacaaggtgactctgatattgtgttgacataagtatttgtcaaagaacaactttcatcaaaatacgcccccaaattaagattctttggtgatacgggaagccgccagtatatggtggtagggttttggacaaagacaaatatgaatgaagtgggaaacagggcaagtggaccgctgtctctgcccgcagctgacagagctgttctctaaacctaaatatgcacagattcgtgtatattaaaagcagtacctcaacagtaaacaagggtctttaacctaggatttaacatccagcaatcatgaaagaagactacgtataaataaaaaggttttgaagagccataagcaaaaacaaactaggaaaagaagttgcaactcatatcacaaaggactaatttccctaatatataagaactagaaattgaaaaaaaactaacaactcagaagaatggattggccaaattgtttacagaaaaagaaatactcatggccctttaggaatgaaaagatgctcggctttactcacgagagaatgcagattaaaacaccaagacatcatttctctgtatgatattagcaacagtgcatatgttgctgaggctgcctggaaacgtgtgctcacctgtgttggtgctgagtgcggatgggcaccactcaacaccagacagaggcgtggcccactctcagaattacaaatgctttgatgtttaatccaccagtccccactctgcagattgtatgctgtagatacaccttgcacacataaaaataaaagatgaccaggtttttaatatcagagaactggaaactatactgggacctgaagcggccgtggaataaacagcgttagagtgacagaccccataagtacccacagaccagaaggtgctctgggcactgttaagtggaaaaaggaaagtacctgattcatgttacagcaggctgccttttgtgtcaaagaggataaataaaaattcacaaacagtgaagtattactctattacactgggaatggggagaggatgctgtgggtgggaacagggcggtaatgagacttgctggggtgtgcgtctttgtatgctatctttttatcttttatatatatatattatatatatttttttgagatggagttttgctcttgttgctcaggctggagtgcagtggtgccatctcggctcactgcaacctctgcgtcctgggttcaaacaattctcttgcctcagcctccggagtagctgggactacaaggtgcccaacaccacgcccggctactttttttgtatttttagtagaggcagggtttcaccatgttggccaggctggtctccgactcccgacctcatgtgatccacccgcctcggcctcccaaagtgctgggattacaggtgtgagccactgtgcccagcctgtatgctatcttaaaaaaaaaaattgttttaagacagtttcgctcttgttggccaggctggagtgcaatggtgcgatctcaactgaccgcaacctccgcctcctgggttcaagcaattctcctgcctcagcctcccgagtagctgggattacaggcatgcaccaccatgcccagctaattttgtatttttagtagagatggggtttctccatgttgatcaagctggtcgcgaactcctgacctcaggtgatctgcctgccttggcctgccaaagtgctgggattacaggcatgagccaccgtgcccagccaaaaagattttctttcatctttttttttttcttttgagacacggtcttgctctgtcacctaggctggagtacagtggcgctgtcaaagcttactgcagcctccacctcctgagctcaagtgatactccagcctcagcctcctgagtagctgggactacaagtgtgtgccaccattcccagctaatttttatttttgttagagctggggtctcactacgttgtccaggcgggtcttcaacttctgggctcaagcaattctccagcctcggcctcccaacacgctggggttagagccatgagccactgtgcctagcctttttatatgttaccttgatctttgaatcatgttgtaatacctgttaataaatatttgataaaaaatattcgaaaggtctgccttcaaagagggcaggtaaagggcatcggtgctgtgggactctgaccagcagaaaccccagtggccaggtggacacatgcttagctgaggtgttcagatcccaccccagtctttgcagctcccatctgctctgtgaaactctgtgacatggcacagtgtgtgtatctgagattcgtataatatgtagtgtgctccttttaggtagacaacatgctttaacctaacattttgaaacccagaagaaaattgatggggatcacatttaggaactgaatggatcccccaaaattcatgtcaaacccctaatccctggcgtggccatttggagaggggcctctaaggaggtactggggttaaggttataagggtggggaggccctgacccgatgggatgggtgtccctataaggagagaccccagagtgctcgtgctccctcctgcctgcaggggcactctcccgggacagaccacgcaccagcctctgcgagccaggaaggagcctctgcagaaacggaaccagcgggaaccttgacctgagacttgcagcctccagaactgggagaaaatagatttctgttgtttcaagcccccgagcctgtggtattttgtcccagcagcctgagcaggctgaaatggtaggttgggatgcttggtaaagaaaaaaaggaaattcttgttaagggtgtgaagaggcattattcaagggcccactccagtgaggttttgcagaaaaggagagagatggggctcaaatccgagtacagggatgggtgggagctgacagccccggagcaggggtggggcctgtggacagaaattcctaagtggaaacgtcaggagtcagggtgggtttccccaagcaggctcagcaggatttgctcaaacggagccagcccaggacagagcccaaggtcagagcctggtccacgaggggactcggaggggtggactcaagcttggtcccagaggggaggggactcggagcggtggacgcaagcttggtccgggaaggtctttgtcaaggcccatttgttttattttacagggaggaaactgcagccgagtcagctcctctgactctaggccgaccgttcttccctgtatgacatgtgactcaccagataaagccacacacgtcattcttttaaaattctctactctgtgagtgcaatgaaattagtatttttccacaagtcctttcctttctctaatgtgtaaagtaagaggcagagagatcctgctctagtctctgggccctccctctgctggcaatgttctttttctgttttaaccatctgagcagcacacgaccgccctgtcttggggcagtgacgtgtctgtggtcagtacaggacctggtgctggctctctcgtggccgggaccgacagtgctcacgcctggaccccgctgtgtgtcctaccctgttcagtttgccagcacaggcttggttccattttcaacannnnnnnnnnnnnnnnnnnnnnnnnnnnnnnnnnnnnnnnnnnnnnnnnnnnnnnnnnnnnnnnnnnnnnnnnnnnnnnnnnnnnnnnnnnccaggatggcactttcaaaccatgtcagatcacgtcgctgctgtgctcaggaccctcccgtgacttccttgtccctctcagaataaaatgcaaattcctcccccacacccacaggtgtccccctgtccccaccccacacctcacctgcacttgccaactccagccatgcggctcttactgccgttcctcaatgtgctgggaacctcctgcctcaggggctttgctgttccactgcctgggctttactcagatggaactttctttgtaaaaaattgatttctaaaattatggtaaaatatacataacataaagttaacatcttaaccttttttttttttttttttagac

SEQ ID NO: 97407 - DNA, 14221 bp, Homo sapiens
cctcagtggtcccctctgaatcactctaactcatccttccccccattactttatttatttatttatttatttattttgagacggagtctcactgtcgcccaggatggagtgcagtggcgccatctcggctcactgcaacctctgcctcctgggttcaagcgattctcatgcctcagcctcccgagtagctgcgattactggcgcacaccacgcccggctaatttttgtatttttaggagagacggggcttggccaggctggactcgaactcccgacctcaagtgatacgcccgcttcggcctcccatagtactgggattacaggcgtgaaccaccgctcccagccacccttctatactttaaatcaagcctcatccattctcactgcattactcctaagtggtctccctgcttttaagtcgcacacctgctaatcctagcctgaaatacttaacccttcatggcttcatcacctgttatgcaaaatacaacctctttgtggaacgcagggtccctcccacagacctgctaggtacctgaacactgtccaattactccgctcacctccgggtctttgcgcctgactggcactctcctctccaaatccggacctgccaactgtaagtctctgcacatagccagcgcccgcgtcgcggtgcccagaattcccagtgccccgcaagccgcgtccccggctggagtcccaccctccggagacgttgcccacctgcagctgcagcacttcccgctccttgcgctgcgcccaggcctgcacctcttcggccttgcgggcctgctccaacgcctgccgctgctcctgctcccgctcctcctgccgcagcctcgctatcctgtgagggtcaaagggccgaggctgagcggggcccgggcttctcccaggccggccaggccgcgccgccccgccccgcctcccgccccacgcaccgcagctcgtgcagccgccggttctccgcctggttccaggccatcagctcgcggtgctcggcggcgtccttcagggccttgcgctccgccagaaccccggctcgggcctcgtgcaccttcctctgcacctcggacacgaactccatcctgggtgcagacgcgccaggaatcagcaccctctccgcccactcccaccgtcaccagcgcgcgcgggcggccacctccccccggccgcacacctgagggcgcgcacggtctggcggtagtgctggtaacgctccatcagcacgaagaactccgcagggtccaccgcgggcggcatgttcactcgctcgatcttggatttggccagcgggtcgtggcgggtcttgcggccgcgcgctggcagcaccagaggggcccggggcctgcacggggtccccgcgcccaggcggctcagcgcgcgtagcatggccgagtctcctcactgcggccgcggtgccgggacgccaccgtgccccggaagcggcgcggggaaccttgggacctgtagtcctcgggctgtccctcacgccccgcccggccgtgtggcctctggaaccgaagcggcgaccctgcggacgtccgcatcccgcccccaggctctggcccggccttcccgccagggcccggggccatcccttagttactcccgcccgcggggccggacccgcgtccctccagcccccacgcagggaagggtctcagcggggaagacagggaggggacgaaggacagaactcgacgcaacagcttcggagaacctcacactttattggaggatggcggggcggggcggggctctcgggctgcggtctgcggagggagaggtggcggtcatgtctcaggacactggtctcgtaaccgccgagctgccatcttcctggttctctcccctctcgtcccccccagtccccatgtggcctcccacagcaggacgccccccgcctcccgtagaagcctgaggatccagctagtgtggggatctccagctcccttgggcatgccctcttgtccaccctaaacaagcctgacgcatagaaacctcagcacatacacacaaatcaggcggtaagacattgcctcataggaactaaccactttcttctttagttaccgggctctcctgatgcactgtaaatgtttgatttgcaaaacagtagcaaaccatttccccacgcctgtcttctgctatggtcttggggagctctgcagtccctgagatgttcctagtgcacatgtcagtcaccacctggtcctcttggccctgttgtctgtttgagtgaggttgcatccctcacctctttccactggcctggggtctgtccacctcaagacagtcattggcttgtcaggatgcctgtgggatcccatggccaccactgtcttatagaacaattatctccttctagtctactagtgactttggtctttaacccaagtgctttgtaaattgtctagaatcctcctgggaaataggaaggatagcagacagcaccctgctgtgtgcagtaggggcactgagaaatggctgggggtgctgtggcagggggcatctcagtggtgtttcattctccccaccctcccagcacccaaccctaagccacaatggcctctgatgaccagtggctggtcttgatgctggggacctctcaccctactcaccagcagtgtccgtgccaggtgtcgcttcctgtgaagggaccactgggccgtggtcctgccctcccagggcatgctgtcgtccaggggagccagggcatcacttgggaggccatgggcagtctggactgggctgcctgctgcagtgtccagggcccttccttagaagggaactgatgctgtcctccctaccccgacctcaggctccaggagggtgggggagcccccggccatcactttcttcctccccatgaggctgggagacacccacctgggggcctaagggcattctggggatcctgggctgagctgagggctcgctttcctccagggtaccagccatgggaccagtgctgagcctctgagggtccaaggtgggcagtcagcagcagcaggagcaggaggcctcgcctggagctggccatggctgctctaatggacagggtacagcattcaaggagacttacctcacccccacatccccctacttcctccagggccactttggaaaactggcatctcaggggcagctttggtatctccttatgcccttccctctctgccaccgctcctcatcccaagcatacaggggtccagatcctgggggatcctggcccagcaggggatgatgctccaggggacgagccttctccctgagcctggggcacagaggctacctgccttgccagctctgagggccctcccacttgtccaggtccatccatctttccttcaaggagtttccagaagtggaagaaagttggaggggaacagagacctgaattcaggccaatggatgggaggatagatggatggtcaggggagttctcaatgtaggcgtgtttggagcaccagtgctagggaaccagagttgcaggccttctgcccttttctccgtggcctgctgtatctcttccatagtagttggggatgtggaatggatgagtggtattgatgggggcaagtgcttctaccccttatccctcccatgccaggggcaacaagcacaagaatagatggtagagctgttggggagaggagaggaaaaggggacttctctggcatggttcaggggtggaggcacctgggaatggggaagaggagcagcacaccatacgcccaggatgaaacttggtccaggtgtcctagcccttagggaaggctccccactcaccaaggaagagctgtggatgagatggctccttcaggcagctgcaggaccctagcctgatggccccaggatttatagaccaggcagctccacccccagactccagtgacgtcttcagaggggaagagagaagctcaccacccaacccgcttcccagagcatccagtccatgaacattcaccaggcagctgctgccctgaggccaccgacacatgctccctccccaccaccttcccaggagccttcaggcccaggactcttgctttaggctggcctatgtcctggtctcaccttcccacttcccaggctgcatcttcaagctcctgatcttgagacctagaaagccctcacagccttccctgatcccaaaagagaattgtgtcctgggcaggggcaatgcctgggggctccccaactcccagctcagggctttccctggtggacagtggaagcctaagagtagggagcctggcaggctgttcagaggtacaggggaggctgtgaccactctcccagagggcttccgtttgctcactgtagagtgggttgggtgggacaattcacatccacacacctgggaaccagggctgggtcactccagatggctgggtttgggtggggcagtacctaccccggagtggcttctctcctggcgaagaagcgggcccatgagatggggcccagctgttgggccagtgcagtctccctaggtaggtagaataattttgtccctcaaggctctaacccctccccagtcatggatttggacacagctagcctgggctgctggaagtgggctcttgcttcccagtctgcgtcagcagctcagctttccttggccagccatcagcctctgggggtcagaggcctgtttacagggttcatagccaatctccgcacttgggctgaacagcaaatgggagggccagggtcatttggagagctggtgcgtcaaatcctgtgacaaagatgggggaggggaggcataatgggcatcagtcagccctagacacctggacttcagcagccaaggcaggatgggcacacctgtgaacttccagactgacttattagcagggaccggaaatcaacgtgtggcccatttgttcagttaaattgttttggcttaaatatgcggactttgttaactgggtgatttttagggaaacatttgcttgtggtttagtgaaaatgaatctgagttcgacgtactagtttagttctggttggggtttacagaatgctttcttcaaagatgcaccaaggctggtgtacctttaaaagggggatggttgcctttatttattctgtaatttgattccggcttttcctgaaaaatctaaaccagagccaagcttcctggggaaagctctgctcccttttttttccggcaacatacttagcttttaagaaatgtttggtcctttccagactagaactgtggaactcttgtatccctctcattagaacatagaaagccatctgttcaccacggagctccagtcctcaggatatgaagtcactgcagccaggagctgcgtgtactcaggtgggaaagcagaggttcagaggtgaataaacactcaggtgctgcaggagcacagagaggcacaaaccctgagcaggcggcctgggtgaaggacagagacgagtgagctggagtcacggacgcagggagtggcagcagaggggtgcagcataaggaacaaaatggagaagggccagcaggaactgccgtggatccatggggccagagtatgtgggaaggttagaggaaaggagggcgggcccctgggtgtgggcagtgggaggcaggcatctctggaccaccctgacatgcgaccaggatgcgggggacttgggattggaggagagctgagggtccacagagacagatccagaatcctgacctctgagagaggagacagtggaggagcagctaaagggtgaggataagaggcagaggacagcctgtgacacaaaggggaagagaccatgggtccctggtgtttagcaccaaggtgaccttggtgcgcagggatggaaaagaaatgtgtgggaatgaagtgaggaagggggaagagtgagaacacaggtttctgcaagtagtctctcatagagggaagaacttaggcctggggtgggagacatgctctttatttaattaattaattaattctttttctttttctttttttttttttgagatggagtctcgctgtcatccaggctggagtgcagtggcgtgatctcagctcactgcagtttctgcctcccaggttccagcaattctcttgcctcagcctccccggtagctgggattacaggcacgtgccaccacgcccggctaatttttgtatttttagtagagatggtttcaccatgttggccaggctggtctcgaactcctgacctcaggtgatccgtccgccttggcctcccaaagtgctgggattataggcattagccactgtgcccggcctatttttttttttttttgagacagggtctcactctttgacccaggctggagtgcagtggcatgatcacagctcactgtagcctccacctcatgggctcaggtgatccttccacctcagcctcccaagtagctgggactacaggcgtgtgcctccatgcccagatgatttttgttattttttgtagagacaggatcttgtcatgttgcccaggttggtctcgaatcctgkgctcaagtgatccacccgccttggcctcccaaagtgtgggattacaggtgtgagccactgcacctggcctgctctttatttttaatgagagagacttgagtatttgggacaggggagcaatgaaggaaactgcaacccaggagggacccgcccaaatgaagtgaggtctcagtgtggcaggatgtagggctttgggtgtgtggtgggtgcaggctgttactcttcccctatggagaaacactcctaccctaagccccttgggtcgcaactgactggctgtgggaagggcactggatgaagcagtcactgctgccttttccacacgactgtgctgtgtgagcttcagcacattttccttttggcctatactagtttctgttgggttcacctctcttgtaaacatgcaagccccgagtagaaagtaaaagaggagtgaagagggaggcatgaagggatgagggacacawctacaggctgagcgagacacggagcaaacagctgaggtcattcctacctggagacaatggttttgcacccaggtgatgcctatccactggccaaatcagcacggacttcagcagaaaaccactcaggccatggtggcgcaccctgctgaaggccagccctggcaatggcaggcagcctgctgggaggcacacaagcgcctatgaacggcctcacctgcacattcactgagtggcttgctgacccagtgcctgccctcctgcatcgacttggacttggtcacacagagcactgaagggtagcttgcaaggagccaggggctgctccccaaacttggcacccctcaccagaaattcctcagaatctgtctttgcctaatttatccatacttatcgagactgctgagttttaagtttactgcctcttgggagttcgttagttcctacagaactgaatgtctctaatgactcacactcacctcctgtaaacttccagagggggtctgttgcagcccttgcctcctgcaggtctcctgggtcccttccgcacatctccttccttcccacaaacatcctgggtatgtggygcacagacaggcttccctcctggagccactacatgttaactgctttatctggactctgaggccctctgtaatgtggctctacttcgcctttcctccttttcactcatctaaatttccagcctcccatgggtccagctcaagtcccacctcctccaagaagcacagtagtgctgatccctgaacatgcctccatgggccaggctgaggtgccatctctcactccagaagcctctgaggagcccaggcctgcgctggctctcaagaaaggccctgcctgacagccacagccacgagttcactctcctgctcctgtggtgagctgctctgaggctgggaggcagtggacagacccactctcccagtgtgcccccaacaaaagatcacacttccccagcactccctgtagttaggcatagctatgaccaggtgaaaacctacttgtgaagctgatgagtggaatgcrgggtggattatgagtggaagtgaaaagtgcagatttggcttcctgtccttagaaatgaagctgctggctctccatgctctttcctcagggtggattatggacatggcagtgacccagcttcaaccatgaggakgagaataatatcctaaggatactgggtctctggacagcacagactgttacgggagacataaatgaacatccagcttctttaagaaacaaaagttcaacacttttgtctaacatgtcactcaaaaccaagttcggatctaagactcccaccatctgacttctagatctgagaaacattcacactgtcccagaaatgaggacacgtatgaaagaaaatgggaacaattcaacacaatatatgtggacataaagatttatcctagatagggtgacacaatccagacagttttgtagcaaagcaccacagactggagaggtcagactggcctcagcccaaagctgagccagctctagtctcccctgtgcccctgtccttaaggagactcagtgaggacctggccaccttcctagggagggaggctggccaggaccactaaaccaaagatgtgctgggaatgaaaggagggtcctggagatcacctaagaactggaagggctgtgtttggtggacaggaggagctgggggactgtggcctctctcagataactcagagagaacagcaacaggagggccatgaacagccgaggagagccccagcctgtatggctgccccacccccagacaaagggagagacatttcctcagggagtcaaagcttttattacctgatagtccctagtgtggtgccagagataccgctctggtcctattactccccatgatatcagtggtggggatgggggaggggaccagggagagaggggagggatatttacagtgcatggtggtacggggacaaccactttcctcgagagctctgagaactttgtgctttttttcttagttggtgccgagctacctggaatggattttgtgtttatcttctttagggaaagatgtattaaccaaagcacaatccagcccaatttctcggctgaggatttcacgatatcaatccaaacatcacactatttaattccccaataaaacattggaaaaaggactatcagtgctaacacatttacatataaaatttccacctaataggtaatagaagcctatgtaccaatttctaaaacagttataagatatatacacaatttggggtatattaacaaaacagaatattacaaaatattaaaggcaatcctcctggtccacggacccttgttgccgcttacttgaagttggcataatctgagaatgcatcaatatactcctgcaccaccttgtagcagaactcatactgttcctggagagtgaaaggtagggaaaaagtcagggttactgaagaacacacagtacctgtaattcctaacagactcatttttttgttgaagatggaaaatcaagaggaactgaatgtttttgaactttcacctgagctctgatctgcctgccagagttctgacagcattccccttccgggctgaatgcagcagaccttctacaagcagagctgaccagagctgacccaggccccacagaggtcagacaggcatgtgctgggctgggagacagtgcagctgagcatggcccacgcttaccatggctgccaggctagcatgcaccctggctctcagaacctcgtctcccaaacctcctaacattcacttttctttaccccccaaacatttctagctccatgggattcaggaaaacctctgtggatgtgcggcttattaaagtcagacctcttaacagggagcccaagcccaaaggcaggtactcttcatggatcttccttacccaagacccacagagaagtacagatgagccctgtggggcacccagacaccccttctaacctggcccaacctctggcaacaggggctatgctcccattgctgccatcctgcctcccaatgtttcctgtgtatttggggcaccttgggagggcaagggcaggtctgtgtttagacagtcttctgactactgggtgggcccctctgaagagcctcctccctgagagaagggctgcaggtggtgtggtggcagggacaaatatgtgggcagcataccagtgtctggaccatgtgtggcctctgtagccgcaggctcttgacagtctggaagacatccaaaatcccctctgctttcacacgctccaggacggtgctcagggcacagaaggtccccgtccttcctgccccggcgctgcaacagagcagacacatttaccacacctgtgatggccctctgtgcaagggggtgagtgacagtggtgagtggcagaagaggtgggggcaggcagctggtgctcgcctttgccctgtggacccaccagcctggaggggttctgggtcgggaggcagtgtaccctgtgcccttcctgcatggccccatgtgctgtggagggactcacctgttggaccgtgggggacgaccttcactcacaccccaccagcacagagccattgctgtccacctgcacatgctggcctaggttgttctgacctgctgttcgctcagttagaactagctctagtcctgtctttccctttttctgacaaaccccactccctacactggtgtgtatctgctgattcctttccatgtctttcactttcttcccaaatccacggaatccagactctgaccttgacaatatccccctattcaatgtcatcagctgattcactcaccagacactgagtgcctactctgaggcagggactgtggggtttagcaatgtccccagacaagaagatgtgtggtaaggaaagagaaaagaggagtgggagttctggcagggtactcagggaaggcttgggcaaagccctgtggctgcctgggaaactggcatctcaggcccatggcaggagtgtgctcagagccagcccgtggtgcacaccatcctctcccggccctggccagggacccctcagaacatattgggccttgtaagctgttgttaggattctaagtaaaggagtgcattttttctaaaacgtaacctccagcaacatgccccatacaaaattcaacttttcccctcaaacaaacctctttactgtctctcttctgctggtcacaccaacccaggctcaaacctgggagacacccttgactcctcttctctttcaccctctgttcatagcacaaccggggtctccactgccagtctcccctgctgctctcctgcccactatctgaacattagtcccctagcacttattgtgccaagttcaagctccaaggtcctctctcttagcatccaatcctgtcttggcatcaatctcaactactatgtgctcaccaatatcttgctcttgtatggctttcttcagtctgacccatggtcatcagcttcccctatctgcccctcctcgctttctctctcccgctgagggcaagggtgagccatacctgcagtgcacggtgatggggtggttccctgactgctgctgctgcttctgcacggcggcgatgatgctgatcatgccctttccgtcactggggatgcccacttcaggccagccatggaagtggaactgccggatctgccggctcttattctcctttggaaaaaaggggatcagggaggcaggggtaaccctgcttttcctgtgggcagagtccacccacgacccatcttaccctggtgttggtgaccaggaggtctcggacggtgtagctctcacattcctcctccttcttcagttccactgtaatatctccataggacaccagtccatcagatggccagtactgggcacacttctcctggagagacaggttggagaggtgaggagctcagagtaccacatgtgtagaagcagcactgcccacgagcagcctgacccctctcagtacagccacctcttacgctgatacgcttcgtccccaaggtattgaaaacttgcaggatcattatatcacatcattccaattaacctccgatcctcaccagagaccatctaaaacactgccggggtctgtaaaggactctgactacaggctcacagggtatccaatacttggtggctgcagggagaggaggacgagtgaaaatctttgttccaattcctttctttttctcccatggggtgttttcatatttaatgctgcttacatccgccagactgctaattcagaaaatcagaaccaattcacattcccacacagccatgggcttcaccaccgcccaggccacagtatcctttctcccttttacctttatctctttgatctgcaaggtaccttcaagttgctagcactcgcctttctgtccttgctagtgagcaggaggtggtctactgtctgtctttgcttgcacctggctcacttccctctacagctccttgtgggagtggctgcgtctcttttcatctctgtattccccacaccttgcacaatgcctggcacatggtaggctctcagtatctggtaaatgaatttgttcaatgtctgcagaacaagccaaggcataaatacataaatataacatcacacagttatgctgcccatttctttagagaatttgggggtaagatctgagattcttcactactggcaattgaaaaattctcaaccatacatataatgtcattgaaagatttggaaaaaaattaagtagaaaaagaaattgtgaatagtctcacagtccaaataaaatcatgattattaaagtgttgaatcaagaacatgccctggactagtgcttttccacccatgttctctagaagccctggggatgcctcagggatcggtgccctgggcctctcttcaaccagaacagccaaaaaaaaaaaaaaattctcattaaggctcacctcgatcaggcattatattagtttttatggcactggtgggtggaatggattttgctaccacagtgccttctcaacactgctttacacagtgtctcagctgggatgaagactgggcctttaaaaccatcagaaccataaggtccccatgggtgtgagccacagtgtgtgtgtgctggaggaattgagcatgatctctcagacagaaatacatatcaagtctagggactaggtatcaacactaagagtctcattttttttttcttttttgagagagtcttgctctgtcgcccaggctggagtgcagtggcatgatcttgacttactgcagcctccgcctcccagtttcaagtgattctcccaccccagactcccaagtagctgggactacaagtgtgcgccaccatgcctagctaatttttgtatttttagtagagacagggtttcaccatgtcggccaggctggtctcaaactcttgacctcaggtgatccacctgcctcagcctcccaaagtggtaggattatacaggcgtgagccaccacatctgatcaaaagtctctaaattttgtatacatgggcggattttctctcaagatctctggaagaccaaagaggatttttttttttttttttttgagatggagcttcactcttattgcccacgctggagtgcaatggcgcgatcttggctcactgcaacctccggctcccgggttcaagtgattctcctgcctcagcctccccagtagctgagattacaggcatgcatcaccatgcccgctaattttgtatttttagtagagacggggtttctccatgttggtcaggctggtctcgaactcccgacctcaggtgatccacccgcctcggcctcccaaagtgctgggattacaggcgtgagctgccgcacctggcctcaaacaggatttgtaagacaaggagtgacaatgatttatattttcaaaaggaccagcagctgccatttgaaaaactaaaagtgggttaggatgagagcaggaggaccagttgccaggccactgcagacgaggctgcgcatatgagtcatgcccacagtcccacgggcaagcagtgagagacgagggcttgttcagatgacagcagttacgctggagaaaagtggggaggctctgcctgtatcaggactcagtggcagactggatgtgaggggtgaggagaggggaggaaggaaggtaactcccggattttagacatgagcaactgggcagaaggtggtactatttatttagatggctaagagtggggtggactggtg

SEQ ID NO: 97408 - DNA, 85831 bp, Homo sapiens
gactttagggaacaggtggtgtttgattagatggataaattccttagttgtgatttctgaaattttggcacacccattacccgagcagtgtacacagcacccaacgtgtagtcttttatccctcttctcactctgacccttccctgagtcctgagagtccattgtattattcttatgcctttgcattttcatagcttagctcccacttgtaagtgagaagttaaaatatttggttacctaatcctgaattacttcacttagaataatggtctccagctgcatccaggttgctatgaatggcattattttgttcctttttatggctgagtagtattccacggtgtgtgtgtgtgtatataccacatttttttaatacacccattgcttgatgggcatttaggtttgttccatatttttacaattgggaattgtactgctgtaaagatgtgtgtgcatgagtctttgcatataatgacttctttttttatgggtagatacccagtaataggataggtgggtaaaaatgtagatctacttttagttttttaaggaatctccatactgttttctatagtggttgtgctagtttatgtgtttccttttaccacatccatgccaatattatattattttggggttttttaatgatgtccattcttacaggaggacagtggtattgcattgtggttttgatttgcatttccatgataattagtgatgttgagcatttttttctgtttgttggccatttgtatattttcttttgagaattgtcaattcatgatcttagcctactttttgatcatattatttgttttcctcttgtcgatttgttcaaactctttgtagattctgaatattagtcatttgtcagatgcatagtttgtgaatattttctcccactctgtgagttgtctgtttactcagctgattatttcttttgctgtgcagaagatttttagtttaagtcacgtcgatttatgtttgtttttgttgtatttgcttttgggttcttggtcatgaagtccttgtctaagccaatgtctagaaaagactttctgatgttatcttctagaatttttattgtttcaggtcttagatttaattccttcatctatcttataaggtgagagatgtgaattcagtaccattctactacatgtggcttgtcaattatcccagcaccaatggttgaataggctgtcctttctccgctttatgtttttgtttgttttgtcaaagatcagatggctataagtattcaattttatttctggattctctatgttgttccattggtctacatgtctgtttttatacctttgccatcatgtttcagtagctacagctctgtagtagtttgaagttgggtaatgtgatacctccagatttgttctttttgcttagtcttgctttggctatgcagacttcaagctgagaatcaaataaagaattcaacccttttcacagcagctgaatcaaaaagaaaaagaaaaacataaaatacttagaaatatacccaaacaagaaggtaaaaaaccgctactaagaaaactacaaaatacttcccaaaaatatcatagatgacacaaacaaatggaaacacctcccatgctcatggatgggtaaaatcaattttatgaaaatgaccatacagccaaaagcaatctatgaattcaatgcaattctcatcaacatacgatcatcattcttaacagaactagaaaaaaaatcctaaatttcatataggttttattctcatttttgtcctttaatagaaaatataagttcttaatattagtttgtgataatataagaaatgcattctaaaggtacttagtgaattttcaatcctgttaaacatgcatgtacatatacatgtccatttcttttgaaacacaacacagcatcacttaactatctaataggtatgtcgtgaaatgtgtttattgaagacagtttgaaataataattattattctacataactataaatgatcatgattaattttttttcttttttccacagtcttttgatccttccctcctataaatataatatggcaacactaaattttttatcataacaaaaatatatctacaaagaatacaaaaagtttataaattttgtggaaaatagctaaatcaagacataaacctcctttaatctgcacatcaggaaagcactttatgatcaaactggtccaaattgacagaaacctagttgtctttgttgatcagaagtcccataagtaaccaagactcacaacaaatattcttgagcctaagtcatgatttaaatacatatcactatatatatatatatatatatatatatacacacatacacacacacatacaaacacacacacatatatatcactatatatatatcactagatatgtagatttgtatttgtatgcatatatatataaatcatgttatacacaaacacactaaaacattgatgttaaagaaattataggaagcattgataagagaatattttatacaaattatctagctattgatacatttataaagaaaaacagaaataataaggtggtaaatgttaataatttttgttatcattcttataagcctgaattaattcacattaaacctattctacatcatacttaaaagatggatatctattgtttagtgagaactacaatcaccaaccaaaaaagggaaatgttccaatataaaaacttaatgaaaatataaataggcacttcaaagcaaaatcactgaaaacatatgaaagattataaagtacctgatgctcaggaaaatagaaacaatggaaaattaatgctgtaaagatttgcaacctataaaaacctgagaaatctatttttgcgggagtataatgtgaaataaccttctaaaataaaatgtcaatatacagtttgaaactgaagttctacatctagaaacctgtcatgcagaaatccttccatataagcacatgtatgaacagaatatttcctccagcacttaaatggctccagtcaatgaacacacatacctccaacaaatgtgtgagtgtagccattgtagggaacagtttattccactgctaaatagaaaaaatagtttccagaaaaaaaaagccttccttgcaatgaaataaaataaaatatatgtaaacttgtacaaggaaaaacaaatctagcagagtacacataaatccaaggatgggaattttagattttattctacagaattctgcagcatttaactttttacaatattttcatatattatttatgaggttcaaaaattaatttgtgaaataaatacataaaatcaatacaggaagctctaaaaattaacatctctttattaattcattagtgttattcaaaaaatttgaattgatcaggtttctcacatgctatttcattcatttgcagctttttttttagaacactggttccatgtttaaaatacctatggataaatataacacaatgtttaaaaaattgcaagaactgtagaaatctaaattcacaaaatttttgtattttcttttattatatttaatattttataaatcttacaattgcttaataacttctgctgtcttcttcaaaatgttagaatggttgtgattttgtgacatgactataaatactttgacaattttcctgtcaagtaatatcccctccctttgaagtttggcagaccttgtagctgcctcaacaaaaaagatgcagtggaaataatgcagattaactttcaaagttctgttggaaacaacatgttccctctccgcttctctctctctctttctatcttttgtttttatgtctctttttctctccacatctcctcaattcaatatgtagtccccataataaatgacaatttggcagagagacacaaatatatgcctaagaaatcctggtagcccactagtactttgagcctttcaacctgaatcattaagtatgtaagtgaatgatcttcagataattatagaccgaggcaccataggaaagtagctacctaagaaactttgtggaaggaacacataactgagcccaaccaacacacagattctgagagatggtaataaaatgattacagttattttaaggcctgacatttgaaaacaatttttcatgcagtgatacataactggaataatagttctaaacattttaaattatacatttgtaataaaattacaattaatatatagctacataagtgaaaaatagggaatattatattttgaaaatatctgtaccccaaatagaagagtcagcataacgtggtggttaagagctagcactctggatccagatggcctggattcaagcctctgagaaaccactacataatgatgtggggctggacaagttacttggactttatttgcttcaacttcctcaccaatgaaatggcagtggttgtcatagcattaccgacctcatggggttgctgaaagaatgaattcattaatatttcaaagcaccaaaacaactgtatatacagcaaagtaaaattttgtgtaatcttgaatgtggcaaggtttttagatatgacaccagaagaagaagcaaccaaaataaaattgataaattagatttcatcaaaattaaaatttttacacattaaagaacaccatcaataaggtcaaaagagaaaccagagtttgaagtacatatttacaagttacatacctgataagtgacttatataaaaaatatataaagaaagcttacagctcaatgttaaaaagacaaataatttaatcaaaaaatgtttaaaagatctaaacaggaattttaccaaggaatatttaaatgtccaataagaacatgaaaaaatgttttgtgttggattatatagttgagagaaatatataacgtcttctcaatcacaagtaacttttcctttgtgctcataggcagagaaataaattctcatgactaaacagaaaagctgcctggaatgagcacaagttatttggcagaactataacaatacaaaattaaagataaataaacaaataacattagtcttcctaagaatccatattagtgtttaaaatattataaatgaagagtctgtgtcccatattttttaacagtatctttccccattactgtataagatgctattttaattattattatatgtactaagtcaaacacacacacacacacacacacacacacacacagttgcatgactatgcattaataatagaagaaatgtatgttgtagcacctaactccttccaaaggaactgagtgatgaggtttgtttaaaaaattggtcctattgaaaacagtatggaagtttctcaaaaaatttaatgtaagattaccatatgatgcagcaatcccccttctggatatttatccataagaattaaaatcaggctctcaaaggcatatttgcgcatccatattcataacagtacaatcccagcatctaccaaggaatgaacagacagacactatgtggtttatgctacaatgtggatgaaacttggtatcattaggctaagttaataagtcacaaaaagacaaacactgtaattcctctttataaggtatctaaactagtcaaattcattaaaaaaaaaaagaaaagaaaagaaagtagaatggtggctaccacgtgaaaaggactccataaaataaaaagttgttgtttaatcagcatagagttttaactttaaagcagaaaaagttctggagattggttgcttaagattgtgtacctagcagtactatgtgtacacttagaagtgcttaagttggaaaatttcatattatgtatgttttatcatagcttctactccagcaattccagctaatatttgatatctcatccttatttgctcatagcattcttttcaatagtgtttgctgtgttattgctcttttgtgatggagcaaattctttcttcataggaaatggacattttcccagagctctggagaaaatagcattgcagtgttttgtctgggatcgatggttgataacattacagaagaaaaggctgatgtgattgcatcagcccttgcccagatcccacaaaatattaaatacagtgccataatgttggaaaactaagagtcttaaattctataaagagttaaagggtgaaaattttctccctgaaaagttaacatttaggataatttaatttactgagattgaggcaggaaattaaagaaagaaagaaaaataaaattaaaaagagaaataggctttcctgtattaggctaactagtcccagaggcagcaatgggtgcagcccagacccagggaaattcttaatactatctaaaaagccaggacacacaccaaagaaatgtggtctggtgactctctcagcactccttcaacatagggagaagaaaaacaaattttcctctgttttatggtatgactttacagattcttgttctctgtaactagtaacctcaagatttctgctttatctaaaaagcacagcaaaggtcctgagaagtctgagtacgcctgaactacagctgtctgggcaccatagtgaaggttataagataaaccagtgcaaggctcttttgagcaaaacctagataacagtcatctaggttgcatagcaatagtcatgtgtaatcctgggttatgaacctgtcacaattttattaattgttctccttctgtatccctgctttcgtgccaccgtaagcctgcaccaagttagcccaccccttttttaaagtgtgtataaaagtcaagtgctgtctttgttgggggccccatctttggatggtaagtccgttgggtctgagtgtactcaataaagatatcctcctctatataccccaaggtctctctcgggtcctcctgatccgctacacacctggtgacccacatgggactgagagactgcagcttggctggcttctttgcctgtgggcggtctggggcctcggctgtgggagacccttaacttcaggacccatcaagggaacttaagcccagagaaaggagctgttctcccgcgtccccggtgcccctcccctgacagcacaagggaacccggaggggttgcaggacggttccaggaatggcgccctttcttcagaaccatggtaaagttttggggcccaaggcaggacctatcccataaggacagaaggggagcctgatcacctcccagggagtgacaactaatccaacacagagaggctggggggcggtgagagtggctcacaaatttggatgaaactcacaccccaaccaacacaggacgcgagagtggctcgctaagttagttcagaaggaaactggatgcagtgagagcggttcactgccccaaccaggatagggaactgggagcggggaagtgtgtgagtgcgtgtgaaagagacagttctgggaggaaccaacgggaatgacatgtgtggagctgctgatctcttagtgtaggctgtacgctccgagcaaaatgtaggaccaaccgggtccaatcggtctaaaacaaaaggaaaggtgaatgtgctgcatcataactgggaggaaatgggaggaaaatcgtggaaacccaccccattggaatgtatgttaaagaactttaagaaaggctttgcaggggttgagggagtcaagttaacccctcagatgctgagagctctctgtgaattagaatagcccttttttggtgttggctggcctgccaaatgtgctacagatagggagaaaattggccgtgtgtttaaggtggtgacctgagttggaggacagtcagakaattcagaccaaatttccttatattaactcatggctgaatgcagccctgtttagcagcttattgaagaatgctcacagctcaagccaagagaaatcaaytgtgctgccagctacaaagacaaagtgaaagcttcgcctgtaaacagagttaaagggaaagtcacaggagcttgtagcgtgagcaaacagagacaaaaagaaagccacaggaaaaaccagtttttcaagaaccactggagggaaaagagacccctcctccatatgttccaatctacccccgctttccccaggttaactgcctctgaggagtcaagctcaaatggatacatgcccccagtctctcttgagagggaaaaatctgagccctcactccaggaagttaaggtgaaatgctaggaaaaacaggcaagccacctccagtcaggttgtgttagggctatgcaaatgcctctcctggaaactagaggacccccactagaacccaaaggaatgaggcagcccaactatagcagctgccaagataccaagaggcactcctgcaaaatttaagggaaggcgggagacaggcaatcaatataggaaaaatctcagaggggcatcagggtgcagatgaaagccccagccatttttataaaagacttrgtgaggccagtgcatgatgaacatggcatttgyagagcaggcccagggggatatccagtgaaaattgcagaaaatggaaggttttaaagggatgaatgctactcagcttattgaagtggccacgaaggtgtacattaaccaagatcaggaggcaaagagggaggctaatagaaggcttgagaaaaaggctgatttgctggcagcatccctcatggatgtgggtatggacatgggcatggaagaggccagtctggacagggatttgagggccagccgaggctggaaagagatcagtgtgagcggtgcaaaagaaaaggacactggaaggatgagtgtccagagaataataacaaggaggacagtcagggcattcagaccaaatttccttatgttaactcatggctgaatgcagccctgtttagcagcttattgcaggatactcgcaggtcgagctgagagaaatcacctgtgctggcagctgcaaagacaaagtgaaagcttcgcctgtaaacacagagttaaagggaaagtcacaggagcttgtaggttgagctgagcaaaaagtgaaagcttctccggcaaacacagagacaaaaagaaagccacaggaaaaaccaattttgcaagaaccactggagggaaaagagaccccagggcagtagtataggaaggccacctactggtggctgccacaccagggaggaaccagacatcgatctgattggactggcaggggctgaaggatatgagggtaggacagaccaggctgcttctctttgggacccgaggagcccatggtcagattagaagttagaggccagctaatggactttacggtagacaccagaactaaacacttagtagtgacctgacctatagagccacaatccaagaactgtgcaactattgtaggagccactggagtctctgaaaagtggcctgtcggtcaaagaggtgtgttataggaggatgagaagtccaaaatgaattcctatacctcctaaattgtccagtttctttgctgggaagagacctacttcaaaaactgcaggcacagattacatttgggccgcaagggaatgtaactttaaacgtagtttgcccagaggctatgatgttaaccctcactgtcctgcaggctgagaaatggagactatgcaaaaaagactccggaaccaggagtaaatgaaatgcatgggttacttactaaaattcccagagtttgggctgaaagtaatccacctggactggtgccagcgtaaatcaggcaccggtggtggtagagttaaaactgggagaaactccggttcgggtccgacagtactcgctactccctgaggacatacggggtgtccacaaacatttagagtggcttcataagcatggaatcatagccaaatgccagtcwccatggaacaacattctcttgccagtgcggaagccgtctggggaatataggccagtacaggatttgcattcagaaaaccaggccacagtgaccatccacccagtggtgtcaaacctgcataccttaatgggacatattccagcaagtgccacttgatttacagtcctagatttaaagaatgcatttttctgtctccagtttgcaccaattagtcaggctagttttgtttttcaatgggggtaaatcacagtacacttggacaagattcccacaaggatttaaaaactccactacaatctttgaagaggcactggcctcagatcttaaagtctacaccccaccgaatagttactgtgtcttgctccagtacattgatgatcttcttctagcagccccaactcaagaggactgcttccaagggacccaagacctcctgcacctgctatggaaggcaggatataaagtgtcagggaaaaaggctcaaatttgctttgaaagtttccaatatttaggcttctatataagctaagggaaaagatggcttggttgtgaatggaagcaggtggtttgtgcacttcctactccaaccacctggtgamaaataagagagttcctaggggtagcagggctctgccacatctggatcccaaatttctcactcatggctaagctattatatgaaaccacaaagtgggggaaaaggagaccatcctctgggaggccaaccaggagaaggcctttaaggaaatcaaagaagccttgactctggtcccagctttaggactgacagatctaacgaagcctttctttttatatgtccacgagcaaaagggaatggccataggagttctaactaaatccataggatcatggcactgcccagcgacgtacttatccaggcaattagattctgtggcayttggatggcctcctagttttaaggcattagctgccactgctctgctgggacagaaagctaataaactgactttaggacagcaaatgacgatccaggtaccacactcggttgtaactttgatggaccaaagggggcaccattggttatcaaatcctagaataactcgataccaagggctcctatgtgaaaatctctgcataattttagactgtgaataccctaaacccagctaccttgcttaccattgagtcaatgccaggaagcccccttcaatgctgtgtggatgtggtaggtgaagtgttcttaagccagagagatttgacagatcagcccctcggggaccccgacattggatattttactgatgggagcagcttcatactagagggtgtccgccaagctgggtatgcagtggtgactttggactcagtagtggaggcgaagtctttgcctacaggatcttcccctcagaaagcagagctgatagctctgacaagagctctccagttagcaaaagtccagaaggcaaatctttacagagactccaaatatgcttttgccactttgcatgttcatggggctatttacaaagaaaaagaactcttaactgctggaggtaaagaaataaagtacaaggaagaaattctatgactctgagacactgtataagcccccaaacaggtagcagtaatgcaatgtaggcaaaaggcaggaacattagaggctaaaggaagcagaaagacagacaaagaggcaaagcaagctgcaatggcgactccaccttctaaacaagaagccttagctatgactctcctcccagagattccccttccagagaccccaagctacactcaaatgaaagggcttggtttacccaggaaaatgggaattacgttgaaggaggatgatggaaattctccaatgggaagctagccatacttgaaatgttggcccccagatttgtaaaacagttccaccaaggaactcacatgggaaaaatggcactagagacattattagggcatcatttctatgtgccacagctcactgctattactcaagccgtttgtaaacagtgtttaacttgtactcagagcaaccctcgacaagggcctacttggcccccggggaattcagaaaacagtggccatgccctgtgataacctgcttttggacttcaccaaactgccctgagcagggggctatcagtacatgttggtgcttgtctgcaccttttcaggatgggtcaaggtcttccccacctagacataaaaagcacaagaggtgaccaagggaggcattattcccagatttggactgctcctaaatctggggtcagataatggactggcatttgtggctgaaatagttcaggacttaacttgactattaaagataaaatggaagttgcacacggcctaccagccacagagctcagaaaagatggagcacatgaaccggacactcaagcagctgctgaagaaatttggtcaggaatctcatctgaggtgggatcaggtcttatccatggtcttcccccgagtcaggtgcacccccacaaaaaaaaacaaactgggtacttgccctgtgagattttgtttggctggccacccccaatcataaggcagattaaaggtaatctccgtgagctacaaaaactaactttaagaagacaaatgcaggctttaggtatggccatgcaaaaagtgaatggctgaacacaggaaagaatgcctataagtctgacagacccagtacaccctttcaaacctgaagactctttttaggttaggaaatagaatccacctactctgggacccatatgggatgggccccatactgtggtcttgtccactcccactgctgttgcaggtatcataccttggatccaccacagttggctgaaaccggcagcccaggaccagtggaccagccagtaggacccagaccatctgacctggctgatcatgcaatgagaccacgttgccagtggagatgacaacagccctattctggtcactccggaagctgacccgtctatgcacggaagaaggttgaggaaacagcaagccctgctctagtcacactgggagctgactagtctgtgcatggctgaagcttgaagaatcatcatcagatgagcaaatgtggccagaagtcttagtcccagtaatcttctttgtattattcattatattgctataaccaccatgaaataaaatattttatttttcatccacttttatgtggcactcatttttaacatctacacaaaaagttcacatatttatcttttctggttcattaatcaagctggtgtctatttgattttcctttagctgtaaagagaatgttatgtagttatcaatcatttattatgatcagtctctgaagcccttggaccaaaaactcttctggattgaatttgtcatgcaccacaatggagccaagtacctgctgccacctgcccacaagctcacctggtttcagtactgctctctggatgtgctggcctgcacagctcttgttactctctttgtcatactatgatgcttgattatcaaaagtttgttaagatgagaaagaaggaaaagagagtaggtctgtttgagatctaaggcaggcaggcatgataccaaaaattgtgccatttaatgccaccactatgcatcaaggtatggactaaattctttattacattttacaagacctgtgccttcctgatttgtttgaattttttaatctttgttaaacataagtattgtaaaattttattttcagaaaacctataataattcaattttaatgcttatctgtgtatatttttcagctgaaaataaaatgagtttcactggaaattcagtctgtttacttgagaaggccagaaagacttgctttactgtgcattttaagaaacttcttcttatatatatgtatatatttttatagaatataatacatttatatatttatatattatatataataaatacatatcatatttttattgttttatttcaacttttatttcaagttcagaagtacatgtgcaggatgcgcatgtttgttacataggtaaagaaccctcttctatataaacaaatacattcatatggaatatatgtgtccctgtcagaaaaaagaaaaagaaaamgaaaaagaaaaacagagcaagatccttgttaaaaattgcaagacaaaytttattttgacaactgaagaaggggatagwgactacagtatgaactgagcttaactccaactaagacaaaggtaactgagacttttaaagaaaatctgtttatgaataaaaagggaatatgaggaaatcaaaataaggaaaccaaaaagagagtagtgggctatatggaagtagaaaattacataaaaattaagtgtaaaatgattgattattagacaagattagttagggtaattttggaatttggcagcgtcacattttattgagcaaagcctcagcatgaaggctagggtcaccttccaggacaaatccatgacatagtgcacatataagctggactaaacttggctaagtctcttagcatggtgtttaggcagattcttcctgttacatggaagtttccaaataatatcgttcatgaaatacaaaatgttttctcataaaaatttctttgtttcaaaactctagatgtttataactggcttcctatgtaaaactatgcaacctagtaaaatctttggttagaatgactaaagatgttttccacatgaggccttgaatacacttgagttactattttgctttagtaatgaccatttgtaattggatagtaatacacaaaataaaagaagagactagtttcctttagttcggaattatagatatgtagtccagtccctctagattatgttacatggatttctctcttgcaataagatctcacatttcttgcccttaccttgtcaagtgtgatatttccacctactttaatacctggagtactgaggatatacaaaccagaaatgtatataattattttagttattctctcctcataacatattgaaaaataaattgtaggtggaataaagagtcaaatattctgtgcaacaatttttaaagtccatgctggagaaaacatgataaatggcaaaagctctccaatacctgcgttaaattattgttcattacagcctttggactcagaacaaggtttgaaaagcaaataagagagaagaagggaaccaacttaagagcaattcttccatctgacaagagatgtgtctaaaacagttgaatgaaagagagacataatgattatttctcacacatgaaatagatttttatagtactcttctctatgagaaaatattgtagcaataattgctaataagatgaattattataatgtctagaaaagaaatatacactaaatatttcacttaaactttgaacatatagtcatgccactagaaagaaaaaaataccaaagtacaagaaaaaaagtgtaatgtattagtgctttttatagtaatgtcttctttataaaagagggaaaaccttatagataaatattagtatgcagaaataaygaagctcaacctgtactacacaagttaaattttagtctatttatattttcttaatgaaacaacttctgaaagtgtaccaaggaccttgccaaaatagatcttctttgcaattcttagaccatagagccagatacaaaaatctatgtctattcatgagttatcaaagaatactttcatttgttttaattttgagaagtcttttcatataaagtactatgtacacacacagttaggaaagtatgtgaatatgaagatttactttatagagactcctaaaatcacatagtatattaaattccaaaaatgtcaatattgtgaatgtgtctgtttctttgagattgattctacaagattttaaatatctcagcagttaaaaaaaattaaacaaagaaactctaagtagtcacatggaatcattgaattgaaataacattcttcatccttcatctttttctataaaattttgaatatgctccttaargactgaaatatgcaagcaccacagaagttgaagacaaaaatgaaataattgtgaatttagtcatgaaaataacatatgaagctgagtctatcgatgtcaaggacaagtgttttatataggagttttctgaattaatatctatgcaaaatgtaatgttttttataagataaaacaaatgtgataattagaagtttccttcttatattctttaagtatagtctttaatattcttaaatatattctttaacatacaaatccttaaaacccaataataattgtaaaaattactaaataacagtaaagagtagcgtcttggaggggacgtgtcttctggcatctaccacctcacaaccactccagtgttctctattgatgaagcttagcattcatctagctggcaaaggaagaatgtttacaggatcctgattcagtatcataaagctatatttgcacccaaggaacaataaactgaaaaatagtaaagcataaaatttcaaatttctcatttgttatcattctaaaagttgttgttcctttggacactgaatcttggtaaaattcggatgagtaggagacatggctttcttttgaaaatracatttttgaaagtgggggcatgtagaggttctgagaaagatgagcttagagttgtcccactgggtttaccaccccactggtggtcacttccctaatgtccaaatgtatagtaagcattgagatactagcaggttggatttgttatttcggtagtagcatcctcagacttggttagagggagtctcgttgtgctgggcccatgtgtatccttcacctattgccactctattcatactcccaacaaatcaacactggagtagccagttatttggtgctttacctatgatggaaattagctttctttaattccaagcatattgagatgtatcattgatttcactgtaagttcccaaatattaatctgatgaatcactttttgggtttatgatccagtgaaaattttgttcacatactgcactgattttttcaaggatgtttttctatagcttcttctttggtatagagactttattaaggatgaatttgctcttcataaaagaactagaacattgactcatcataacagtggctcagagtgattgccaaaaaaaaaaaaaagataattaaaggtcagataaacaagtaaaaattaacgaataatctttagtcagataaggtaaactttgctgttggattagtcaatcataatgaggacatacaggttgaaagaggcaggacagaatgaaataaaaattgagacaaacacattgaatcaggtcataaatgctttaacaaagcatacaacttgtagataagaccaagaaatccactagaaacaagagagcttttatcttaaaggaataaatatataaatcaaaaatcaaagtctcattctgattgtttcctctacctacaatccttaggtaaaaatcttccaactgtgtaaaactggttatttcctcatgtggttttcttggggaaatattcaacaggtgttgatttctgcactatcgctcatatttattgtgtattttgagagcatcccttcacaatatttaaaatttcctctcctgcaggctagggacatctacagttccacacatattttattattttttttttaacaaaagtcactgctctctgtaaatttttgttccttacttaggtactatgtctcatttggtttcctcccaaaagtcactttctcatagttctcataagcatgtattcagagaattccctccaattttaacaattggtggacatccttctttcattttatactaggctgtatatgttgttcaacatcattttttcttatgcatgtgtatgtgtctggagcagaagtgggaaaagttgagtcacttatgatcacctcattatactacattttttaatttatttgaggctagtttttaggacacctatttcatatataaaaatctatgagtaaatattttaaaatgcttaatgtttcagtagttgtaaaaaatataaattcacactttttaggattttattgtgtttttaatgtccatatgtaatgaatttcatagttgcttagaggcttctgttgactaactcaataggttatatttgtggaattttgagacatcactgcaaacactttgacattcttatcaaaccgtggtccctccccttgaattttggcaagactcgtggctttctcagcaaagaaagtatactggaagtgacagcatagttttgaagactgtgttagaaaaggcagtctgtctccgtttgtctgtctgtctatgtcttttacttatacctctttctctctctctctctctcctccctctttccctttttctccctctatatactttggagcccagtgttacacccaaagtcctgatgataaatgacaactcggggaatgatgcaaagaagagactaagtagtcatgattattcagtcccacaggaatttgagtcttttgacatccatcaccaagtacgtgaatgaatgaccttcagatgattacatccccagccaccctattaaagtaatgacctgagaaatactgtgtatgaaccatcttgctgaacctacccaacactcatgctatggaaattgtaataaaatgctaattgtttttcaaagtccccatgattgagggtagtttgttaggaagtgataaatagctacaaggatatttctaaaaatttaattatacattcataataatatacacttaatatagagacaagaaaatggaaactacaaatgtgacattttgaaaataactaactcagaaaggggagtcagcgtagcatggtggttaagagctcctgcactctggatccagttagcctggattcaagtccctgcaaaacctctagagaattatgtggggtttggcaagttgcctcacctgtacacctcaacttctccatcagtgaaacggagatggagtaatgccattattcacctcctgtggctgatgaaaggatggatgcattaacttggtaaagctctacagttgctgtatgtagcaaaataaatttgcattaattataataattattaaatagacagaaaaatttccacaatgatatgagtccttacctaaattacttcacatattttttaaaatgtaaatgtttcaaatgtaaatgataaaaataacagcatttgctatttttaaatatgtaggaattacatttattgtaatttaattaatcaaaggataacaaatcagtgcctctgggcaaactctggccaaccacatgtttttttaatatttgaggtaagaatcacataaaataatatgtacattttaactatttaaaagtgaacaattcagtggcattcacagtattgtgtaactaccattgcaatctagctccaaaactgtcaccaacctaaaaggatgtgyatacacattagacagtcacttgccattcaagcagcccatagcctggtaacctcgaactgtctgttaaaatcatcctgtagtatattaggagatttttttaaaaggtatacagcaatatcattttcaactaaatttttttttcttaattttcacgtgtcccatttgttcttaaattgcaatattctagtatgtaaaaatttactttttatgtcctttgcccaagttttaatgaagttgtttcttcttgtgaatgtgtttaaatttcttatagatgctggatattagacctttgtcagatgcatagttagcaaacattttctcccattctatggttgtctgtttactctgttgataatttcctttgttgtacagaatctctttagtttgattgaatcccatttgttaatttttgcttttgttataattgattttgctgtcttcattatgaaaacttagcccatttctatctctagaatggtagagcctaaccaacaagcatatgaaatatgaaaaaaaagctcaatgttactgatcattagagaaatgcatgtcaaaaccacagtgatattccatcttacaccagtcagaatacaatctcacaccaggtactggtgaggttgcagagaaaaatgagtgcctatacattgttgataggagtgtacattagctcaaccactatggaaaactgagtgtggtgattccttgaaggcctaaaaggagaactaccattaaatccaccaattgcatccctgggtatatacccaatagaatagatatcattctatcataaagacagctgcatatgtatgttcattgaagcactattcacaatagcaatgacacagaatcaatctaaatgcccataactgatagactggacaaagaaaatgtggtacatatatactgtggaatactatgcagccatgaaaacaaatgaggtcatgtcctttgtggaaacatggatagaactagatgccatgattcttagcaaactaatacaggagcagaaaatgaaataccacatgttctcacttataattgggagctaaataatgagaatacatcaacacatagagagaaacaacagacctaatagagggtagagggtgggaggagagagagaataaggataaataaatataagtcatgggttttaggtttactacctgatgatgaaataatatgtacaacaaacccccatgacacaagtttacctatgtaaccaaactgcacatgtatccctgaacttataataaaagtttaaagaaaaaatgtttttttctccttgattgttggcttaatttttcctaaatatatgcagaaggtggagatactttacaaaaaaaatttgtaccagccccttcaaaaatggtagaattagaagttccatggagcaaatttcaagggaaacagtgataactagtgaaaattgttttctaaaacaaccagtcgatgcctctggaaataaccctgaaggcatacaacaaacaaagtaacatgtactgaagaaaatacactaatttgtggtgaaaacagtgagagtctttggcatttaaaccacaacatgctcacttgcccaccctcgtaattcactgtgacagaaactacctttgctccagggagatgctgacaccaccacaggcttcccactccccaaagcttccagttgagggccagagtatgctgttgaggagagatgtctctctgaatttcttatctacacacactaaggcatatgctgcaaragctaaattcctccagacaagtgtggctaagaagggtctcccatctttcatctaaccacagtcataactcagaggtttaactcaagaatggcacagagaatattgagtaccaaataatcactgccccagctcattcataggatgaagttaccatgatgggagaggaaaagtaagaataaaggtcagagccttactcttaaggcatgaatgttgctcagaaagaagtgtgtcactgtctctgtccccagctgtatagccaaggtcaagacttaactgcaccaggagagtcaagccataaacacatagctccaaatctgttcccaaagaaacctgttttatttttgaaaatatgagaagttttatgtttaaaaatgtgagaagcctaagagtgctctaaaaatgtaggtattggtgcatatgtataattatttttattttttgttaagtgtatgtttaaaaatataaaatttttcattttcttgattaatactttggcctgaattatgtctgatctgataagatttttgctttttattttttatcatttattgaatttacctcatatttcttagtccaagtcaaattttttcaactttgtaagtagtttatacttgaggttgattgttatatacagacagatgttaaagtttatgttgttagccagaagaaaaagcttttctttctttagtttctgtacagtattcttttttattctcacaccaagcatttttagagattataggtacctgctattgagctctcaaaataagatgggatctatgttattatcaactaaacttttattcacaaaatttgctgtataatgaaattattttcatttgactagagttagaatttgtcatcgtgccataattaggaatctttaaaaggcatattataggccctcatgttacttcataatgctaactggattataataataatatattgctataacatgtattatcagagtttgaatatatcaccacacatcctttatgcaaagattgagaacatatgacctaatttctacataaagtatgataaatgtaaaatgttgttttgattttacatactttacatgaattgcatacaccaggagtaactagtaaagttgagtgtacaaaagtgaaagtgagtcgatcgtagacaaagagtacagatttggtgagagtttattagagtaagaatgaaaacaaaataaaaatgtaaattttagaaatataaagatatatgtgaaaacggcataactgatatgtatgaaacatgaagtataaagaaagtataaagaaggcagaaactaacactggtaatctctaatatcagaaattatctgtatatttactatttttaaagtttttatataaagttatatgtatgtaaaatatgtgcgatatatataatttattacaaagtttcatgtggaatgttaaaattatccaatttttgaggcatcattaaagtgactcaagcagaaaaggtgtaatctggactgtcctaaaaatctggggcctattaaaacactcttcatatttatttaacrtgtatggatatttttcacgaaatgtatattttttcatgagagaaatttctaaatttctttaaattatgtagcccagtagagtcttaaattgaaaggcagtagtttgagaattttaaaaattgtttccagtaggacatatggtgcacaatcatacatttattacataaatatagtatgcttaatgttgtttactttagtgtatgagactttcctattagcacttgtactacagttacacattgtgatgatgagagacacccacatgacatatacctacaaagacacggctcaggcaaatgcaaagcatgcaactaacggcttttaggatcagccaggttcctatagtttcatatgcacctgaaagtgggcaggacctgctgagatcagctatactagcctagatcaaaattgtgagaagaaccatgaaaccatgagttaaacagttttttttttaagatattaagaaatgaggtagtttgtaatgcagcaacagaaaactaataaaagactttctccttgagttattctccatgttacaagtcttttatcattaatatactttattgagaatgtaaatgtgcaatacatctgaaagtacagaccatttgggcaccatcaaaaatagaaaacacaaagtcccactgtgctctttattaacatttgacaatgaggcatccaagaaaagtctggaggcccagttcttcccattttttccagcccccagtaaagataacaggaacagtgatatgtgaccatttactatattgtatgaagttaacatttcaagcagaaattctaagaagttgatccatgtgttaatgtttaatggatcaccattagaatggtgttctttatagcttagaaaataattccaccacatctggaaataattttactaacctttaaatccaggctacacttgtcctcatttccagtcttcactgtctaatatatttaatatatagtcatctgggagaatgagtgaatacccattaatgtccatatccacattcttcttcttcccttgcttagtgcgttgggacatacaccaatctgactaatttaaggtatggtctctcacctcataaattcccctaaactgattaggaagcttttactcatgtcttgtagcaattcttttgcatatggtgagcatcttactgtctaaagctgtctcaaccagtccctctatacactttcctgaacaccttctgcacctgatgccaacatatgtattcaraatatattcccataatcagtgtgattcttttaaagtacactatgaaacatatattagtttaattcacatactgagtaaatttcttcttaatttttagatattctttgtaaatatgactttctaactctgacaacacttctctttcttcaacgccacaaacctctccagttttgcctcactcagtataagctggggcactggtggcatagaaaaaaaattcaggacgggcgcgatttctcatgcctgtaatcccagcactttgggaggtcgagttgggtggatctcaaagtcaggagttcaagaccagcctggccaacatggtgaaacattatctctattaaaaatatacaaatttgctgggctctgtgacacactcctgtaatcccagctactctggaggctgagacaggacaatcccttaaacccgggaggtggaggttgctgtgagccaagattgtgccactgcactccagcctgggtgacagagcaaaactccatcccagaaaaagtaaaagaaaaaaaaatcattataaactgtaattattgtactttctaagcactcctttttagaatattcttttaaatatttaaaatcttcttttaaagctcagtcagtaaaacaaatatcatcatttacctttctttcttaagtactttcttccatcctcagcattatattcttcttgaatatcagtttttgttagtttcatgatcatgttagttttcaaaatagtggtaataattacatcttgggacatagaaagttctctaaccagtttctccatatttatcgctacccagccaacctgtgaatagcctactttcctttaacacaatattcagtttcacattaaataaaactgatgattgtgcttcgtttaccgtcacttaaaccatggtttacaaggacttaaaactttcacttaaacattttttaaaaatttgaatgattactactaattttcacaatatactaaatktgatggtgtcaacttgaccggattgagggatgcctggatggctgatgaagcattgtttctgagtgtgtctgtgaagatatttgcagaggagattgacatgagaattagtggactgagaaaggaaaacccaccctcaatgtgggcaggcaccattcaattggctggggtcccaccacgacaaagcaggtggaaaaagggcaacactctgctcatgcctttgctcctctctctttattccacagtggaacatcttttttctcattttttcctttggatataagactctaggatcttcatcttctggatcccgcgacttaaaccagtggcccgctgcaggcgatcaggactttggtctcaaaccggggacttcactgtctggtttcctggatctatactttgactaagccaggcttttagtgtctgtggttctccagctggcagatagcttgttttaagacttcactttattgatcttctgagccaattttcctaaaaattcttttcatttatattctattgtttctgtccttctggagaaccctgactaatacagattttggtaccaggagtcattctagaggaacggaattttaaggatgaatttccttaattgttgttggggtttctggaattggctgtataatctgattagacctaaaagtcctaagaaccctacttccgataatacagagaccatagatagtttttggcctaagctgtttataaagatatgctaaaaaatgcattttatacacctaatttaccacttacaagaggcagggtattttgtgacactatacatgatactttcagaaatttgtggaaaaccaataaatataatgatgttggtttgttgctaacattgctggacaatgttgaaagaaaaggatgagctcagagattcaaattcttagctgaaaatggatatagcctaagcatttctacatgttccctaaaggagaagcatctctcctttagccatagggatgaaatggctgaaaatcaaagagaaaccctagtcatttaattagctgacgtatagaaaagatggattttcaacctcactgggagtctgctgttaaaatgagggcattgattgagaaagaatgggaccctgtaagttgaaatggggatctatgggaggaccctcatgaagctagggacatttagcctaatgtttgagtaattttgtttgtttgttcgtttgttctttgcctaggcaagtgacctcccacctcaatgacagtgtcattcctcacccattcccacagtgtcatcggtttttccacctatgtcaacgtaactgcattgccggaagtaacagtaatggcctctcctgaagcagttggcaggtgaagcaaggctgattttcctcaggacctatcctaacgaccccttttggtttctaaacctataactagacttaagtctcagcaggtccctaaagggagattcaagatatcacccatgaggaggtgcactgcactctgaaagaaacacctgagtgttctaatttatataatcagaaatcgggtaaacatatgtgaaaatggataataagggtgtgggaataacaatagaagagacacgaagtttgatgacaccaaattaatatatgtggtctcattaagtagagattctgcatttaatatagtacattgggatgtagccaatgattaggctggaaggttaaggatttgtgagggattataggattgatgatgaagaaaattaaggaaaaactatctggataaacctctttgagggggcaaaatatatgaagacatttgtgagtcatgtgaatgttcttcaaagaatgacatcactagaagaaaattttaataataaagtggatgggatgacccctcctgtagatctggggtcagactctttcctcagctacccctgttatcacccaatgggctcatgagcaaagtggctatgatggcattgatggaagttatgcatgggttaagcaacataatctttcactcactaagttcaacctggctaaagccaccactgtgtgcccaatatgcaggaacagagagccatgctaagcccctgatatggcatcattctccaagataatcaaccagcttcccagtggcagattgattaccttagaccacctccatcatagaaggagctgcatttttttcttactggaatacatacttattttgaatatggatttatcttctctgaacatatacatctgtcaaaactaccatctataaatttactggatgcctaattctctatcatggtcttccacacagtattgtttctgactaaggaactggctttactgacaaagaagtgcaacaatgagctcatgctcatgaaatttactggttttaccatgttcctcattctcctgaagcaactgcctttgtactatagtgaaatggcctttagaagttatagttacagtgtcagctaggtaacagtacttttcatggctgggccaaagttctccagaatgctgtatrtgctatgaattggcagaatcaaatagacrcaataaaaaatgatatgggggatatcaccactgatcccacagaaatacaaactgccatcagagaatactataaacacctgtacgcaaataaactagaaaatttagaacaaattgataaattcctggacacgtacactttcccaagcttaaaccaggaagaagtcaaacactggttattctagttagaaattcatctaacctcttttcaaggttcttagcttccttgcattggattacaacatgctcctttagcttggaggagtttgttatcacccatcttctgaagcctatcaaactcattctctatccagttttgttcccttgctggcaagttgtgatcctttgtaggagaagaggcattctggcttttggaattttcagcctttttacactggcttctccccatctttgtggatttatctaccttttgtctttgatgttggtgaccttcagatggggtctttgagtggacatgctattcttttctgtttgttacttttatttctaattgtcaggcccctctgctgcaggtctgctggagtttgctggaggtccactcctgaccctgtttggctagatatcaccagaggaggctgcagaacagcaaagttttctgcctgttctttcctttgaaagcttcatcccagagggccacctgccagatgtcagtcagagctctcgtggatgaggcatctttcagcccctattgggaagtatctctcagtaaggatacacaggaatcagcgacccacttcaggaggcagtctgacccttagcagagctcgaacactgtgctgagaggtccactggtctcttcagagccatcaggcagggacatttaaatattgaagttgtgcccacagccaccccttcccccaggtgctctctgtcccagggagatgggggttttatctcaaggtgaataaatgaataaataaataaataaataaataaataaataaataaataaataaaatcattgactatagtcactctggtgtgctatcaaataataggtcttatttacttattctttaaccttttaaccatccccacctaaaccccacacccccattatctttcccagcctctggtaaccacctttctattctctatctccacaagtttaattgttttgatttttagatcccataaataaggggtaacataaaatctttgtcttttggtgcctggattgcttcacttaacataatgattttcacttctatccatgttgtcagaaatgatggaatctcttttctttttatggcttagtattacagtgttatgtgtttgtaccacattttcttaatccgttaatctactgatagacacttaggttgcttccaattcttagctattttaacagtgctgcaacaaacctgggagtgcagatttcctttcaatatattgagttccttttttaagtatatattcagcagtgagattgctagatcatatggtagctcaatttttagtcttttgaggaaacttcaaagagttctttatagtgattgtactaatttacattaccaaaaacagtgtacaaggattcccttttctgaacattctttcagcatttgttattgtctgacatagctaaaagccatttaactatggtaagataatatctcattgtagttttgatttgcatttctcatatgttcagtgatgttgagcacctttttatatgcctgtttttcatttctacctcttcttttgagaagtgtctattcagattttttgcttgtttgtaacttggattattagatgtttttctatagatttgtttcaactccttatatattctggttattaatctctaggtattttattctctttgaggcaattgtgaatgggagttcactcatgatttggctctctgtttgtctattattggtatataagaatgcttgtgatttttgtacattgattttgtatcctgagactttgctgaagttgcttatcagcttaaggagattttgggctgggacaatggggttttctagatatacaatcatgtcatctgcaaacagggacaatttgacttcctcttttcctaattgaataccctttatttccttctcctgcctaattgccccggccagaacttccaacactatgttgaataggagtggtgagagagggcatccctgtcttgtgccagttttcaaagggaatgcttccagtttttgcccattcagtatgatattggctgtgggtttgtcatagatagctcttattattttgagatacgtcccatcaatacctaatttattgagaggacaagaatttaaagctcataaatctgcttgtacctcaatcccgtttttaatgccgtgtttcaacatgaaatggaagaaagcataaagaattgagtggaaataaatgatttagaccctgatgtttttaaagaaatgatgacattcattaacacagggaaagaactaaaccttgacaaaatgacggacaacttgttggcagctgcagacaaacatgcactgggaacagctaaaggtcatgtgtgaggaagctttgtagtaatctctcagtagaaaatattgctgatccccttgtccttgcagatttgcatgttgcagaacagttgaaagcacaaaccatagacattattaataggtgcagtgtacttcgacaacttcgctgtaaagataagaaaaactggaatgtcaacgaagcaaccaacataatggaaacatcaaggtgaaagtgcacgattcagtctcacccttacttagcagcagaagccttctgagcactagcatctgcacagtgtccacagtttggcattccacacacacggctaaaacagtcctaaatcttccatgaacaattgaaaaatggaattgacttttagtcattcaagtccagaaggattctaatacataaaccataagaaagagttgtttctgttatttggtccacagaacagaagcttaaaaagcatatttcttgaatttcaggtggataattaatggtttatttttcaggtttaagttagactgattaaatcacttcaaggccttaaattattttcaatgacttctcttgttcatataatgttttaatttttttattgtgccttgtcattttgaccaatgctatgcagrattatataaactagctttataatgcagtaatattgataagtgaagatattaagtttcaaaaggatcttttattttgaaaaataaaactgaattttatagggtttgtcctacgctgtctcaaggtttaagattaaattctctttaaaagcactcgtattggagtttaccagtaatgtcttcaatctaagttctataaatatgagagaacctacttaccttccaagtaagttacagcaatacactgcttcaattctaatttattttttatttcaaggggcaaataaacaatgagttggcccagatttttagtgaaaattgtgatgtttgtcttgtatgttaactgtccaataaactgtgggtttatctaagtttacaatatatgagaattgaatgaggtttaaatatcatgaagaaagcatgtattgtgtggaactagtttttttttaatttacagtgacctacatttatatgtacatgttaagagtaagtatgaccaaatgtaaatttaatgagtgggtcaattagcaaagatatatatatatacataatatgtatatacacactttcatttttactgtgtaactttgtatgctgaatggtacatatttatttttgcttttgagataattaataaggtagaattaattgtgttttaatacttgaaagaaatttttaaaaggaggcaactgggatgtttgggataataaataagaaagatattcttgattgtattaaatagttttggattgcagatattcattattgaatttactcctgtttttcacactttggaaaatacatctaacaataaatgaatcttggatagtctactctccttcaaaacctgaaccaaaggccaaggcaggtggatcacctgaagtcaggagtttgagaccagccttgccaacatggcgaaaccctgtctctactaaaaatacaaaaaattacccaggcgtggtggtggatgcctgtaatcccaggaacttgtgaggctgaggcaagagaattgcctgaaccggggaggcagaggttgcagtgagccaagatcgcgccactgcactccagcctgggcaacaagagtgatacttcatctcaaacaaaaaagagagagagagagagagaactgatacttgcctgtgggagatgcaaacaaaaagagagaaactttagagtatatcaggtcacacaccatgagcatccccacccatctcttatttctttgtgtttcagttactgtaataacattgtggatgatatggaaattctgcttaatatgaatagttataaactataatttggaaaaaaaatgaatgacaccaaatgataacttgaatttataagaacaaaaaagaatggtaatgaggaggtgtagtgtggcattttgatattatcatgatattggaggcaggtaacagatatcaacaaattctgccctgtcatttagtacttttgtttacaggatgactgaagaatacacactacaaatgttataaatgttatcagaaagaagttatgtattaatgggtaacttcactagcacaataacaagaagtaggtattgaaaaaaatctgaaacgtatcatggagtttaggctttccatgtaacctgggccgttttacttaccctaattttgaaataggcctattcagtatgttgttcagagggctattcagagaatggaaacccaaggctcacctttcttgagtctaagtacccactcagccaagtatatttagcaaaatagaaaaacyaaactgctttggtgactggactttgccaatgtctgaaagaaagaagtaacagaaaggagagtctaaagttgatcctgtacagtataaaacatttccccaaaacgactttgcttctaacacctatattgatgctacctcccatctgagaaagaagggggatataagcaggagtcaaggccaggcacagtggctcatgcctataataccagcactttgtgaggcctaagtgggagaatcccctgagcccaggagtttgagacaaagctagatgacttagagagagcccatttctttaaaaaaaaaaaaaaaaaaagcaggacattgaggtgaaatgcctgtagggttagttagtcaggaggctgaggcaggagaattgattgagcccagtagtttaaggttgaagtgagctatgattgcaccactgcttcactgcattccaacttcagaaacacaatgtgaccctctctctctccctctctctttctctctctttctcagaagaagaaggaggatgaggaggaggaagaggagaaagaaatgatatggaagaggggcagggaactgcagggaggagaagggtgggtccctggcaagggctccacccttggcttgtgcccagggacctaggtgaggacaggcactcctgctttcacacccaaatgttgcatttcccaagatcactctgccttgccacacccccatcatatgcctataaaactcctgagactctagcaggcaagcacacaagtggctggacgtcaaaacgagtggattagcagaagaagaaacaagtggctggacatcaaaaggacatccaggggagcacgcaggcaggccatcaactggcagaacaatgcggagtttggctggggcaattgaagaagagtcaggctgctcagcagccctactctaggggaaatccgtctgcctgctggctcccccatctgctgagaactacttctactcaataaaaccttgcactcattcttcaagcgcacgacaatcccattcttctgataaaccaaggcaagaacccctgatatagaaagcccttttttcctgtgataaggcaggtgtctaactgagctgactaacacaagccatctatggactgctaaactaaaagagcatcgcataccgggcagaaggaagccaggcaggaagagaggttcagatgctccttccaccataaaatatagtaataactagctttctaatatgtacatcacaactttgatatttgaatatttgtaaagcagtttttagttttatatcctgtatagcattcttgtaatcatctatactaatatttttgatgcaaatgtggagttacttttacaactcagatagcaagtagatgttctagcatgcatcctgctttttggggggctatagtaggggatatgcagttttctttatccacagtgtgctctttctatttgtccacttgacaatattgtactcattcttcaagtctcaagtcacataccacttcttcaatgtgtagccttcacttattgccccagagaacttggtgcttctttcttgagatctgaaagtaattttaatgcagttttactgttgcagtaatttgttatctagagaacactgcccatttcattgcctcatattgagcattgctcattttaattctaagactcaccacaaataattattcaaaaatttatgtaatcctaggtcatctaaaaaccaaagcttttatacctcatggtggagccaatggcacctatgagaggatctaccatgggatccctgtggtgggccttctttgtttgtaaattaacctgataagtttgctcacatgaaggctaaggcataagctgttagagtagactcaaaaacaatgtcaactatagatttgatcaatgcatgaaaagcagtcattaatgactcttcatgaatgtatttttttaactacatagcatgtgttgataacttctcacatgaaggccaaggaagcagcagtgactttaaacaggaacacagcactgagtactttttttttggtaatgcttaaagacaattgtcaataaaccactgtgagtatcacaatctgtttttttggtggttttagtggaaacatttgtcagagattttaggatagtacatacattttaaaatagccaaaaagtgaaataagaggaattgctgaagatggtaacaggaagatgataaggaagactgagaacaaagttgaaggaaagaagcatgaacattattacagcactgactaattttcagcacagttatgagggtcttttaggatgagatctcatcaaatattagtctttaaataaattttgttttgtctattgaaggtatgtgaagtgatattttgggatacaaatacttagttaaaagactaccataatgaagtaaataaacatgtccatcatctcactttacttaccctttttccatgtttttaaaactcttgtaaaataatttattttcagtaaatcagcatgacaatctatctctaattcccattatatttaatgctttccaaatttttatgcttacattttgatcccatcactgataacttgcaagcaactaaagctttcaaacttgcctttaaaaattattgaaaaaagaaaatactttataagtgtagccatattcttgctcttatggttgtggttgcttttgcttatttggaagatttataaaattgagaaataattgacttgaaagagataaattggaatattcccatttaatagccaaaatgtctgaaaccagaaatagaggattttaaaattatttcaatacatatattaatttcagttatgctattgctattatattggtaatatgaataaattttaattaatgctctgttgaaaaataatttttaattagttaatgaacattgtatatgaaatgacatgcattatattggtaatttgtattatgtaacttcttggttatagtttttcccaattgtattaaaaatatgtatcaggattaatgccctcctctaaaaaaacatagtcttcttactctgttttttaaatatcaaagagagaagttacctccattgatattgctacagtgccatgctttagcaatttttgattttgacttggtaagcctcatacttatattcatccttattccttattagtcaataattatttcaacactctaaataaatggaactacaatgcctcaaagtaaaatattaagcaccacttagattttaaaatcacaatgcaagtaaaacagtaataatagtgaacatctacttattctcttaatgatgagaataattctaccaagtatcctaaaaatcattacattactactcacaataatcaaataagtaaggtaccattcttattcattcaatttaacaataaaaaraaaactaggaacagatacattaaaaaaaaaagatcagtagatatcaggtcatgattcaaactaaggccatttacttttatatttttaatcactaattcactgatgtaatgtcagtactaattcctgatcaatgtcaacttcttatcagctttgccctgacatgtacctgaaccttgtcacagatttgtctcctatctctagactttgatactattttgaaacacgcacatcaggttcgttacaatttcattaatggctaattcaacctctgtaccctcaaatgatttctttttatccttcagacttaactaattttaatttctaggatggaaatacttgttctctcttaaattctcttttcacattttgaaatcttatgcatccaacaaattctaacccataaaccaaaatctctataaccaccaggaaataaaatattttatttttcatctacttttatgtggcactaattgttaacatctacacaaaaatttcacatatttatattttatattccataagtttatgtctatttgattttcctttagcagtaaagagaatgttatatggttatcggtcattcattatgatcagcttatgaagcccatggaccaaaaagtcttctggatcaagtttgtcatgcgccacagaggagccaagtacttgccgccacctgcgaaaaacctcatctggttccagcactgctctctggttgtgctggcctgcgaggcaatttttactcttttttcataatatgttccttgtttgattatcaaaagtttgttaagacaagaaagaaaaaaaagaaggtagcactgtttgatatctaaggcaggcaggcatgatagggaaggtcatgacatttaatgccaccactattcatcaaggtgtggcaaaattctcctctatatttcacaagacttgtgccttcctgatttattcaaatattttattctttgctaaatattaagtaatatacaattttaatttcagaaaacctaaaataattccattttaatgcttactcatgtatatttctaagctaaaaaaatgagatgcactggaaactcaggctgtttatttatgaaggtcagaaatagtgcatttctactgtgcatttttagaaacctcttttttatttttattttattttatttttcatttccaacatttattgtaagttcagagatacatgtgcaagatgtgcaggtttgttacgtaggtaaagaatactcttctatataaacaaatcacaatgatgtgtattatatgtgtccctgtcaaagaaaaacagagcaagatccttcttaaaaatggcaagacagattttattctgactactgaagtaggagatagagactactgtataaattgaactgaactctaactaagacaaaggtaattgaggcttttaaagagaaaactgatatgaataaaaatgaggaaaacaaggaactagtgggttacatggaaatgaaaaattacataaaaattaagagggaaataattgaaaattatgaggcaacatgggttagacagtgtatgttttgcagtttggcaggatcatattctttagagccaagacctaccatggaagttagggtgacctttaaagacaaattcctgacctagtacacgtataagttaagctaaacttggccaagtctcttaacatggtgtttaggcaagtcttttgtgctacatgggagtttaaaattcaaatccttcatgaaatacaaaatagttcttaatggaaatgttctttgctttaaaattataggtggtcgtaactgacttcctatacaaaactatgcaacctggtaaaatccttggttagaaagactaaagatgttttccacatgaggccttaaatatgcttgagttactattttcactttagtaatgaccctttgtaactggataataatacacaaaataaaggaagaggctagttccctttagttaggcattatagacatggtcccgcaggtttagcccagtctctctagattataatgttacatgatttctctcctgcaacaagatctcactatttcttggccttattttgttaagccagacatttctgacttctttaataccgggaatactgaggatacacaaatcagaaatatatataatcattttacttgttctcccatcataatatgaaaaaataaattgcagatggaataaagagccaaatatcctgtgcaataatttttaaaatctatgttgaagaaagcataataaatggcaaaagatctccaaatcctgcctttaaatattggtcattacagcctctggattcagaaaaaggtttgcaaagcaagtcacagagaagaaagaactcaacttaagagcagttcttctgtctgacaagagatgtgcctgaacaatcggatggaagagaggcataatgatcatttctaacacatgaaaaagatttttatagttctcttttctataaaaaatatttttatcaacaattggttataaaacaaatcattttaatatctagaaaaggaatatacactgaatattttactttattaaactttgaacatatagtcatgccactagaaagaaaaaataacaaagtgtaagaaaggaaaaaagtaatgcattcgtgcacttttaattatagtaatgtctttttattaaagagggaaaacttatagataaatatgagtctgaggcaataatgatgctcaacatgtactacaaaagctaaattctagtctgtttatattttcttaatgaagtatcttctgaaaatgtatcagaatatatcagaatatactttcctaataaggtatgttatgaaaatagatcttctttgaaatttttagaccatatatccagatacataaatctatgtctatccatgagtgaacaagtaatattttcactagtttaatttgaggaagactttctacataaagtgatatgtacatatatacttaggaaaatatatgaacatgaaggtatacttgatggagagtcataaaaattccatagtaaattgaactacaaaaattgcaataatatgatgtgtctgcttcttagagattgattctacaagcttttaaatatctcagcagttaaaaacatttaaacacagaagaaactaattatgttggggcatcttctgtaggggcactgcacataacgggaatgggagtcaaacatctagatgttcccacttagcctctggtcatccagggctcattttctgggaggagcaaaatgttctttctcttcaaagctgaggagctcagtccctcatttatctataaaatgacagttctatcttcatgcaaatgtgcagacaagccaattgagtttatcttttggataaaaggcaatggagaagactcttcagaatgcaccccagaactagaattagaatcctaaacaacaacttcctaggaaaaaaataagttcaggaaaaattgatgtctgtcaaccaaagggagatccagggctcaagaggactgaccagttccatcagaggagcttaaagtttgaaaggccttcaatgggccccttctggtactttagtttcaagttcaggaaacattttgggggtcctgggttttctgggagttcccacatgttcaagtgtcaaattattgtgaggaaatgagtcaaactctgtaaaatattcaaagagatttattctgagccaaatatgagtgactaatggcccataacacagccttcagctgtttagaacatgtgcccaatgtcctcaggctacaacctggttttatacaatttagagagatgttccacatcaatcaatacatgtaaatgatacatgggtttggtctgaaaaggtggggcaactgcaagtgagattctgaaggtcatatttagattcaaagattttctgattggcagttggttaaaagaattatcttattgtctaaagcattagaatcaatagaaaaaaatgtttcttttcaaacttaaacagtgtattctatcagtattttgttctgtggtgatgtaatgctgtcagctttttctgaattccaaaatggaggaggctctaatggagctcgtctcatttctcccatttccaaaatggcctgaactagcttttcaggttaactttggaatgccctttgtgagcggaagggttcattcagatgattgcgggccttagaatattatttttcattaacatttttccccttcttgccagggtttgccagaggcaaggtcaatggccagcaaactcttattttgttccatagcattgctgggatggcatgtgccctgggttcctactgtctgtggttgagacacctatggctaagagacttagagccaacatatttacagtcaacttaaatgtactagaccagacaggaatgaatacggacaagcattataattaactcttaaaatttttaaagtaatataaaacccaagaaacagaaagccaaagttgaggttaaaaaactaacttatcttaaattgttatatgcatagctaatgtagtctttgttttagttactgacctataccaattagctatacaatacatgaacattgttaaaaatgctyttttgcaatttagaggcttttgctgtgctgcaagactttatgaagtcttttagtaatttaatctaatgtggcttaaaaaaattgtttcaaatatgtatctatctaaataaaatctcataattgtgagtattatatccaggacattttgtcatgaggtatcataatattccctctgtaataattttattttagttctacaggaaacagaaaattctttatggttgggataaataaaaatgtgtcatataatagctcagaaagcaaagttcctagtttttccagctgtttatctccccttcttgacttggagggtctgaattaattctatccctcaaaaccggcccttacaatctcatggtcccaccatttctgtggtagtccctggacatagagggaaggtacttgtattgttttacagaaggccatttgcagtaaaaaacaaatcaatcccaataggatttcaaatgaaggagattaacaggctttgtcaaatcatctctagtcttcrgaatagcatgattctgattttctcagaactaaaactagggggagacattgataacattaataatttgacaaaagagaatgtgggtgccagaggagaaaaaaaaaactattccattagggtgccaaacaaaaacatgaagaaaaatgataacctggtattctttaggagattattgcagccaagaaatgagtcatgattcaacctgcactcaaaaacaaaagtgacttttcttttgaaacaatgtctctctctctagttgcttttcatactaaaaaaaagttcaatttgtgtgcaaaataagtttcaggattattatacttggccttattattcacataaagttcagcaagaattgtttggccacataggctcttttcaagttagctttactggaactttacgtaaaaacgttattctagtcaaagccttggtaaaataactggtgtctccaattgtcctattttaaaaatatatattttttactaaacttataccaataacaatattaccacacaatcaaaagactcatgaacagtttgcaaattttggagaactcagagaggtaaatttgcttacaaaagcaaattttacccaattgctctaaactataaaaaactcaaaagaaaaatatttctttgactcctctttaactggagcagcagctttccaaacaagaaggcatgtattcacctttgaactgccattcacaagataagcagctcttgtaatatgagagctttttattaagcactgtagaatataacagctcctcgcatagtcagagtccatcctaaggagaaaaagaggctccctgttcataaatatgtctttcttgcatcccaggtagcaagattctgtataaaccatttttattttatcatggaactctttcagtcaccattatttctgctagcatagaagtagtttcagttaacatcccatagcaaagctgtaaatacttctcaagtggaaattctctagtccaaagtcccagtaattgtcatttgaaagtgctcacaggcttttgccataagcccaaataaactttccacaaagggctatgaagtgaaggatttgtctcaaccagcactttagctagtactcacttagctgtccaaatagcatttttcaaagagcaggtttacatgccttcaactttatacaactacatcaggaaaatctcccccattcagatagaatacccattttcataaaacatttaggtaaaggaatcacaaccaccttacatataacctgtttaaacatctcaaatttcataatcctctcaacatttacaattttatgctctgagcccaggagcttttcttctttatcttcaaaccaatttacctttctggtaaaaaattaaccctcccagaagagggttgatccaagagactcaagcccttttatcaattttttatctaaacttgcctcaacattgcgcaggcaatgtcagctttcccattagattacaaactttgctttaaaaaaaatccaatctaaggcaaatacaaaaaaactggtgtaggtccctataatgtttgaagatcagcaggggctcccttttgttcaccccacttttatagcattgtaaaagcctttgtttttaccctatcaatttttattttattttatttcttaataatcatctaaagatttccaccatgatagatgagtcctttgactcccttttaccttgcccaattttttaattaccctaatgttttaataacatcggtaagatccatgggggacagcaaatttgggaaggcttctcaaacagctctttgattctgcaggagtaatgtcacctgggatgcccaggtagaagggtccccctaaaccatagcatttactatgaccagggtaataggtatatttaattgaataatattctggtcatcataaagccagttccatatggtttgcatatgaagcatatcaggtgcttcatctggggaactccacctggaattttacagggtgagttgggcagtccatttctcagggtaatcaaaccttayggtggcaattattcagtccactgggctgcttgtgaagctgggtcacatatactcctcagtgattgcttaatcgtgagctgtgggacctgcataaacccctgctttttcattctgtagcatttaaaataaaaaatattgcccttaaagtagctatttttccagtccattatagtaaacgtttctcaggaaactgattatattattctacaaaggagcaatttctttacattataccctctgggtttaatagttaacttctttttctatttaagtgcattggctatcttcttggtaactacaggtctcaaaggtaactttgttgccctggcttaagatgtgtgtgtgtgtgtgtgtgtgtgtgtgtgtgtgtgtgtgtgtgtgtgtgtkcctgtgtgtgtgtctagctttgaagctagtggcctgagctgagagtccacatgtaaatttggtcaagccttaaggcaaaactccgcactcttttactttcattttagcgattacagatagcaataaccaagggaattaacattttgtagttttcttattagtttccattttgttatgcattcactgaactaactccctgggagtatgtctatcatccatctctaaattccactggtaacttttacctttggtaactgaatgcagcccagctgcagcttttgaagatgggagaccatgtagccacctgagagtcaaaagtttcttatttcctgagttttcacttttctctttatccatctggtcatatatatatatgatatatatatcatatatacatcatatatatcatatacatcatatatatcatatatatcatatatatcatatatatcatatatatcatatatcatatatatcatatatatcatatatatcatatatcatatatatcatatatatcatatatatacacacacatacacatatatacacacacatacacatatatatatacacacacatatatatgtgtatatatacatatatatatatatatatgtatatatataaattttaagttgactcagcctcgagaacacttggtcacagggtggggaacatcacacactggggcctgtcgtggggtagggggagggggaagggatagtattgggagaaatacctaatgtaaatgatgggttgatgggtgcagtgggccagcatggcacatgtatacttacgtaatgagcctgcacattgtgcacatgtaccctagaacttaaagtataataaaacataaagaaaaaaaattacattttcaatagcaaaaatcacatccttctgtttttataaacctcacccaaaaaaactttttattctacaactattttaactctttgtaacctaaattctcagtgaccatactgaggattacttaatttaacataacatgactcagattttaaactattggagagaaatttgagattaaattttccaaattaatgttaccaaatattgctatagtcatgtgaactcaaaggtatccaagctagcttttattagtgtgataagcaattaacttttctttaagtcagttggttagagctctttcatatattttgatattgaaatatcacttccacatgacacaagtaatatatagacataacagacatacaaaggcagatgttgggaacaggccccaaaatctggccataaactagtcctaaaactggccagaaacagtctctgcagcactgtgacatgctcttgatggccatgacactcaygctgggaggtttgcggtttaccggagtgagggcaaggaacacctggcccacccagcgcagaaaaccgcttaaggcattcttaaaccacacacaatagcatgagcgatctgtgccttaaggacatgttcctgctgcagataactagccagagcccatccctttatttcggcccatccctttatttgccataaggaatacttttagtaaatcttatcactggcttgctgtcaataaatgtgtgggtaaatctctgttcgaagctctcagctttgaaggctgtaagacccttgacttcccactccacacgctatatttctgtgtttgtatctttaattcctctagcaccactgggttagtgtctccaygactgagctggtttcagcaggcagattgaaaaatgtttttcatttgcctgttttcaaaaactgtctcctttgctttagactaataataaaaagaaatgttacagaatttaacaaaagtttaaggagagagttaccatccaaggccttctcaaaacagagaaagagctgaagcagcagggttcagcagaaactaaatttctattacactgattatacagtttaaaaactgaaagattcttgcattgaataactcaatattttaatacaaatttttataaccaattcattagttttgtatttgtctaattttaatattaatatccaattaccaggaagactattataatctcattttaattatagcctacttaatcatatgttttatacatttttttaaataaatttcattttactaaacttactatgacttaacagattcttcataacatacttcggctttggggtttgtcttaaacatacatcttcttaacctgttattttattttttcgtacaagatttgttttcttgtaatctttcttaccaaaggtacctatttatatttatgtttctttaaatctctcttattccctagtgtcttttgccttgtattataaataatgtttaaataaactttgaactacaaaaataattgtcttttaataaaaaaccattttttaaagtttccttataatttttgaaattgaaaagtacccatacatttaacatatatctattatttaatataattttagattccaaattatatgacattcattttagtatagtcacgtaatacatttatttaatagtttacttagattatttataaaaactgtgacagtcatcatttaattatttttttgttgctgttaaacatttttataccctatgaatttcaggaatttacctaactaagaaacttaaggttaaatacatgggtattttaccaataactcaggatttagttgctttcactaaaccaataatattaaatgtcttctttactaaaaattacacaagcaaagatcattctgttttgggctgggttcatagtattacaaaccttaggccaaattttggcaccttacaatatttggcaggaaaaaaaaatatttggcaggaataagtatgaaaccacttgatcaataagtggaaagaaatatgctgacaattcttaagacatctctagtattactttaccaataattttaaagctagcttattcattaaaaattttacttaagtcacatggacttgaaaagccattaggcttattatttccttaatttatgaggtctccttaactttaatttaatttggttccttgtagctataacacacaaaaaatacacgtatgtgcagataaacagacacatacacactcataacaaagattctagagcttttactttagaactccagacatgagatattgatacaaactcactggtttacaagtaataataataataataaaaagaaaaaaacaccaaaacaatggtcctagccaaaaagtgatttttttttatcagtagaaaactaacagtagacttaaagcaagtaggggaaaaaaaatagaaaaatagagaacatagaaattttctagtacatgtcagcctttgggtctaaatttttacttaacgtaatttggccatcagtttaaaatgtgcaaaacagaacataatatgtaactatttggagcactagaaagtctgatactccattctcacattgttaaaaagaactacctgagactgtgtaatttatgaagaaaagaggtttaattgactcacattccacagggtgtataggtagcatgactgaggaggcctaagaaaacttacaatcatgccagatggtaaagtggaagccaacatattctacatggctggagcagcatgaaggctgggggtggtgacacacacatttaaacaaccagatctcatgagagctgtatcacaagataacactaggaggatggtgctaaaacattagaaaccaccatcacgattcgatcacctcctaccagcctccacctctagcactgaagataacaatttgtaacagttcattctcacactgctaataaagacatacccaagactgggtaaattatacagaaaacaaggttcaatggactcacagttcagcatggctgggctggcctcaagaaacttaccatcatggcagaaggggaagcaaacgtgtcctttgagcaaaagggggaaaagccccttataaaaccatcagatctcatgagacctcactcactatcatgagaacagaagcatgggaataaccagtgccatgattaaattacctcccacctggtccctcccaaaacacatggggattatgggaactataattcaagatgacatttggatgctgacacagctgaaacacatcacattttaaaatgagatttgggtgggaacatagagccaaacctcccaaatctcatgtccttctcacattttaaaacaaaatcatgccttctccacagtcctccaaagtcttagcacatcccagaattacccaaaatgtccaaatcctaaatttcatctgggacaaggcaagtcccttccacttatgagcttggagaataaaaaacaagtgagttacttccaagatacagtggggatacagcaactgagtgaatgttcccattttaaaagaaaaaaaatggccagaacaaaggccccaggcaagtccaaaacccagcagggcactcattcaatctcaaagatccaaaataatttcctttgactctatgtctcacatccagggcataccagggcaataggagggctctcaaggctttgggaagctctggccctgtggatctgcctgtctttttctcatcttcctgtctttttaggagccctccaaactattccaacctctgcccattacccagttccaaagttgcttccacatcttcaggtatctttacagtaatgccccacctctctagttttctgtattagtttgctgtcacattgttctcacatcttctgtattactttgttttcacatttgttctcatattgctgtaaagaactaccggagactgggtaatttatgacgaaaagaggtttaaattactcacagttccctaggctgtataggtaccctgtctgaggaggcctcaggaaatttataattatgagaaagtgaagggaagtcaacatgtcctacctgattggagcaggaggaaggtgggggaagctgctacgcacttttaaacaaccacatcttctgaaagctccatggcaacacagcactagggggtgttcctaaaccattagacgtggaatgccctcacacttctccattttacacaaatgctttcaaatggaagacccatgaaaccaaaaaattgttccaaagcagtttttctcattgtctttcctcattcttaaattctttcacacttcttttcttaaaaggaggaaccgagctgtagcctaggcttttttgtgtggtgcatcaatgtgtgctgattgtaagtgagactccacatgttttaacgttgagttgtttctgccttgttacatgtgttagtgaatctttaaaatccttgttcttcagtgccgtaaagaaatagcactggaacataaatttaatttcttcagcgaggccaatttttttttttactttatgcagaaagggtgcacacatcagcagttttgccatgagagtacaccaaataaaggagacggtcatttataacttgacatgtcaagcttactgctgtgtccggggtttctattggaaggaacaggacatcacattgtgtatttgtcctgattggctagcaacttagaactttttaaaagaggcaaaggcagaggagaacaaaggaaggcagaagtaacttgtggtatactgagaaaggtaaaaacaccttcaaataaggaagaggaacaggctatgacctaatgcttgcttagaccagtgtaagcatgccagggcaaatatttacactaaattgtgggagctgagaacataaaatacattgatttctttattatggttagcagatatttaagaatgttagcacaggtctttgaataaattttgcttgtaagagaagttactacttattcttaattagatggaggggaagtctttgaagaggaatctctactttactttttacaccgaagcagcctagggtcactggagcagtcttgttgtttgaggtattaccaggagttcttgagagggttgtcattcatttcacagttgaatccaaagacttttataaaaaaaaaaaaaaaaaaaaaaaaaaaaagctaatagggcagagtgtttcattcacataaggcacgaaaaacaggttaggactggatgtcttatttgcatacatacaaattcttgttagctccacctcttctctctagtgtgcatgcaggtccttagcctgagttactgcatattgttttattttgcttattgcgtatgtgtcactgcagacgtgtctggttctgtgtaagtttccttatctatacagctacaggtctgtcttaggcaagcaccctgtgcaagttcctttacctgagtgtgtccagaaagaaaaggaatgtgctcaccaaaggccaccgtgtgtaggcggagctcactggttgcacagaagacaagggctttggactttgcttccttatctgtgcttgcagcttgatttcttccacattgtcattttttggggaggacttctaccaagaacctgtcctaactatctgcctaactggttacttattctttcttctctcattagtttctctctccagacatctatcacctccatgagggctcaaaacaccgagtgatcagctctttatgcgtttgctagatgagctttttaaaactcattttacctaatgtcattatcagccttctgcttattaagacagaaaccacaaccatgtcttttctcctgtacattttttcctacctcagatattatcagtaaatacaaattttaaattaatttcttgcagttactattaacaatttgtgtttcattccattaggttggcatgtctcagtaactaatatacaattttatcattttccctgcttttaaactcttacctttacataccactctatgttgagatgcaagaatttcttgctaaagaaaggcttgatcttgtgactgtcttttaaaacttgagtgaagaattatttgccaataaattatcattcaaactcataattgtttatttaaaactaagttcccctgtttcaaactaactttcttctgtaatgtcctgccctgacctttctctgtgatcactactcactggaatgattttcaaatattctatactttcaaatattttcaaatattctatattctatgtgtagacatayacatatagtgtgtgtgtgcatgtgtgtatactggaaataaacattttttaaaagtataggaaatagtgacctgaactgatcatatgctgggcaaaaactcaaaactcaattagtttgttgagattcaaaatcataaaaagtatgtggtctagctatactagaaataaattagaaatcatacaaagaatgataactaaaaaattctctaaactttggaaattaaaaatacatttttaaaaaattcagtcaacaaaatattgtaattatacatgcacatktatctcagcaactcttctcccaattatatatctaacagaaattaatatgtaaaactaatgacatacatatagataaatatatttataccagaataactaataatgtccaaaaatgtaaacaacccaggtgtccatcagttataaaataaagaaatactctgtggtatttgtcaatcaacagaatactatacagcaatgtaattaaccaataactgctatacaaaaaaagacacaagtatatattatataattcaattatataaacaagtaatgttaatttattaaattagaattcaggttaatacttaaattgagaatgaaaacagtgactaaaatggtccaaaaggagagagttcctctaggcaggttttaataacccagaacctaagaagtaggtgtctttatttcaggataatatttaacataatcttaaaattttgagttactcactagtgtgtgtatatttatcttatgtatctcatacttaagattttattttagaagatatataaaatattttaaagttctagaaattaaatagcaaaataagcatgaaacactggagaaaattctacaggtactatatagtgtggccaggaaaagcctctctaacaagtatcatttaaggggaagcctcaaaaagagatagaagcaagcctcattttattgcaagacagaatgctctgaaaagggagagaggagacaaaaggtgtaaaggggctaaggtgagaatgcctttgagagcttcaagattaatagaagcccagtgtccctagaagagagtatgcagggggaaagtgttaggagaagttgccagtgcctgaccatgtcaagttctgtagaccaaaaacagatcttattccctttttttctattaaaaagcatgtcattcttttttattttattttttatttaacttttactttatgttcaggttaaaaaatgcaagttgttatataggcaaacttatttcttgggggtttgttgtacagattattttgtcacccaggtattaagcctagtaaacacaaattatttttttctgatcttctccctcctatcaccctctacactctgctaggtcccagtgtgtgtagttcccctccatgtgttcattcatgtcttcccattacagattctcttcttaatgtgatgagaatccagatggaaatcttaatcagtggagtgtcataatctgacattaatttcaaaaaaaaacattattctggcttctggaaggaaaatatagcagaagacagaagagwagagtagaagcagagagattagttagagggcatttcaaccactgaacacaattatttcttaaaatatcaaaatagtccaaacacggtggttcatgcctgcagtccctgcactttgggaggtgaatcaggagtgctgtttgagtccaggaatttaagaccagcctgggcaacataacgagattccattagaacaaacaaatttaaaaataagccaggcagagtgtttgagctcgtagtcccaactactcagtaagctcagttgtcaggattgcttatgcccacaagatcagggctactgtgagccctgataaagggaacaactccagcctgagyaagagagcacaaccgtctctcaaaaactatgtgtatcaaaatgatcattctcagattgcatttctattatcttacttatagcacttagagtggctcatcatatttcctctggtagaaagatgttaactttcccacctgactccatttcacttttaaaaaattttgcctatgataaaattataatttaaaaccaaactttctatgatgacccaatttaaaacattcaatttctatgtcaattctataatatttactttgaattatttgtgtaacatttttcaaagactttccatagacttgatatatttaggaaaaaaattactttctatgttggtatttttctgtttatccttagctatgaagagaatgttttgaaattatcaaggattcatcatgatcagccaacgaagccccgggatcaagcggtcttctggattgagtttgtcatgcgccacaaaggagccaagcaccttcgggttgcagcccgtgacctcacctggtttcagtaccactctttggatgtgattgggttcctgctggcctgtgtggcaaatgtgatattcatcatcacaaaatattgcctgttttgtttctgaaagtttgtcaaaacaggaaagaaggagaaaaaggattagttatatcaaaggcctgaagctggaatgaccaaaaattaggagttgtccagtttattgcagcatgaagtggtggaaatggaaaatttccttccccctgtgacaaaacatcatttcacaattgaccctgttaagtgaaaaacttcttttccagagacttagtatctatttaagttggaaatattccaagtcaaatatttaaaaactaggataaataaaaataataaaaaaaccctgtggggttttaaggttattattctaattaacaaatgacacaaaaaactttactgagcttaacgatgtttcacacactgtgcatggaaattactatattcagaagttcacttacagtgtcagtactgtttttcatatgctcagaatactttggcttcatttggagcaggtactgtttttcatatgctcagaatactttggcttcattttgagcagatttctatttttttttactgttgccaaagaaactattcaataattaaattgggcaagaagtctcactcttcctattcttcctattgatattgcaggaacagtagtattgtttggcttcttctatgcatccatactcagtgtcactgctttcctaaaagacattacaagtttatccctagaatgaaagataatgttcaaaattaacaaatatgatataccacattaacaaaataatgaataataagcaactgttatctcaataggtgcaaataaaagcatttgaaaaattcaacagtttctatgagtaaaaaaaaaaaatcttttaacaccctagaaatataagaaaatcaccttaacatgaggaatgatacatatgaaaacctcacagctaaattcatactcaattaaaaaatctgaaaaaattttatctaatatcagaaccgggtaatgatgctcactcctgctgcttctatttcacatagtactgtaagtcctagctagaacaaatcagcaagaaaaataaaaataaaacaagtttttaaataagaaaagaagtaaaattacctctgtttgcagatgacattatagtatgtgtggaaaactgtaaagactctacaaaatactactagaagtaaaacaaattcagtaaatttgcaggatataaaatcaacatacaaaattgtattattattcgtatactaacaaataactatcaagaaacagtccaatttataatagcataaaaaatatataggaataaacttaaccaagtaattaaaaaaacttctgtactaaaaactataagacattgatgaatgaaaggaaagaatacactaatttggaaagatatattatgttgactgaaatatttaataatgttgaagtatctatacaacctgaagtgatttacagattcggtgtaatccctatcacaatcccaatgacatattctattaaaaaaaactataatttatgatcctggaaacactctaaatagccaaaacaatatgcaaaatgtagaaacagctgaagtcatcatatttccttatttcaaattatatttagagctagtgtaattaaaataacatggtgtattagtctgttttcacactgctgtaaagtactacctgagattcagtaatttataagaaaaagaggtttatttgactcatagttcctcatggctggggaggtctgaggaaacttataatcatggttgagtgcaaaaagaaagcaaagcatgtactatatggcaacatgagagagaaagagagagagagaagtgccacagttttaaaccattatatctactgagaactcactcactatcatgataacagcatggggaaaattcacccctgtgatcgaatcacctcctaccatgtccctctcctgacacgtggggattacaattcaatgtgaaatttgggtgagacacaaagccaaaccatattatccccacctcagcctctctcaaatctcatgtcattctcacatttcaaaatacaatatcccttttcacagtacaccaaagtcttaacgcatttcagtattaacacaaaagtctaagtcaaaagtcacatctgagacaaggcaagaccctctacctataagcctgtaaaattaaaaaaaaaaaaaacaagttagttacttccaagatacagtggggtacaggaatttggtaaatattcccattccaaatgggagaaattggccaaaacaaaggagctacaggctccatgcaagcctgtaaccccatatggcagccattaaatcttaaagcttcaaaaaatctcctataattcaatttctctcatccagttcccactgatgcaagggatgggattcagtggtctttggcagttctacccctgtggctccacaggagggcacagcccccatggatgctttcatgggctggcattgagtgcctgtggcttttccaggtgcacagagcaagctgtatgtgtatctaccattgcggtttttggaagatgatggccttcttctcacagctacactactcagtgcctcagtggggaaactgtgtggggactccaccccacatttccctttgtatttccctagtagaggttytccatgagggttctgcccctgcagcagacttctgcctggacatccaggcatttccatacataccctgaaatctgggcagaagttcccaaatctcaacttcagcgttctgtgaacctggagggctgacacctcatccaagacaacaaaatatggggcttgcatcctctgaagccatggcccaagctgtatcttgatgccttgtagccacagctggagctagagcagatgggatgcagggagcaatgtcctgaggcctcacagagcagctgggcccaaggcctatagcaaaaaacaatttttccctcctaggcctaaaggcctgtgatgagggtggctgccatgaaggtctctgaaatattctggagacatttttcccattgtgttggctactaacattcagtttctcattacttatgtattttggcagccagcttgaatttcaatggggttttcttttataccacatggtcagactgcaaatttttcaaactcttgtgctctgattcccttttaaacataagttccaatttcagacctttttttttgaacacatatgactgtatgctgttagaaacagccaggtcacatcttgaatgctttgctgttttgaaatctcttccaccagataccctaaattatctctctcaagctcaaaattccaaatatctctatggcagggactgccagtatctttgttaaagaatagaatgattggcttttactccagttcccaataagatgagtaagtttaagagaactgctgcactatattgtggccatagttagcaataatgtattatacacttaaaatatctttaaaagagtagatctcacattaagtgtttacactaatgcaaggcataccttcaagatattacaggtttgggttcagatcactgcaataaagcaaatattgcaaagaagaaagttacacaattgttttggatttccatggcatataaaagttatgtctaaactgtctgtattccattaagtcagaaatagcattatgtataaaaatgtacataactcaattaaaaatactttactgctgaaaaatgctaacaatcatctgatccttgtgtgagctgtactctttttacttgcagaggatcacaatttcaataagacaagaatgatgtttactgcattcattgatcttttctttcatgaaaaatttctgtgtagcatgccatgctgtttaataatgctgtataatagctttttacccttagtagagattcttttaaagctgcaatcaatccactcaaacattactgctgcttcattaaataagtttaagtaatattctaaattctttgttttcattttaaaaatgttcaagccattttcaccaagagtatttttcatctcaatatacccctttctttgttcattcatatgaagcaactcctcatctattcaagtttcatcattaaattgaagcaattcagtcatatcttcaggttctacttctaattacattttacttacaatattcaccacatttgtagttacttcctccattgargtcttgaccctgtcaatattattcgtgatggttgaaatcaacatcctaaaaactcctggtgatgtcgatattttgacctcttcccatgactctcaaatgttcttaatgtcatctaggaagatgaatcttttttataaaatgttcaatttactttactaatatccaacaaagtaattgctatcaatggcagctatattcttacaaaatgtatttcttaaatgcaataacttaaaagttgaaattactttttgatccagggctatagaatgaatgttatattagcaagcatgaaagcaacattaatttctctgtatatctcattttcttgagtgaccagacctattgtcaatgagcattaatattttgaagggaacattttttcgtaagcagtagatctcaaaagtgggattaaaatattcagtaaattatgctgtaaacagctatgctgccatccaagctttttgataccactgatagagtacagaatagatttagtatatttcttcagggccctaggattttccacgtgataaatcagcattggtttcaacttccagtcaccagcttcattagcatctaatgaaagagtcatcctatcctttggaactttgaagcaaggcattgacttccctgtagctttgaaagtcttagatggtatcttctttcgataggagactgttttgtccacatggaaaagctattgtttaatgtagccaccttcattaattatgttagctacatcttctggataacttacacaggcttcttttatcttgcattttattttatggatatggcttctttccttaaaccttataaaccaacttctgctagattcaaactttttttctgaaaattttttacacttttcagaattgtacagagttagagccttgctctagtttagaatatggcagaagaaaatatcttcactggttttatctttaatccagaagattaaaactttcttcatataagcaataaggctgttacacattcttatcctttgtgtatattgttgtagcacttttaatgtccttcattaacagtttgtttgtattcaaaatttggctaaatgtttggcacaagtatgggctttgccctatctcagctttaaacataccttcatcattaagctcaatcatttctagtttgattttaagtgagagacatgagacccttcctttcctttgaactcttagaagccatttgtagggttattaatttgcttaacgtcagtattgttgtgtctcaggaaacagggaagcctgaggagacagagataaatgggaaacagctggttggtggaacagtcagaatacacacaacacttatcagttctgtttaccatattatatgcatgcattttgtgatgtccctcaaaaaattacaatggcaatatcaagaagcaacggccacaggacaccaaaactgatataataaaaacaaaaatgcttgaaactttgtgagatttaccaaaatatgccacagtgacacattgttagcatgtgttagctattggaaagatagcattggtagacttgcttaatgtagggttgccacaagggttcagcttgtaaaaaaaaaagtccatatttgtgaagcacaataaaacaaagcaaaatgacagaaggaatacgtgtgtgtgtgtgtgcgtggtgtgtgtgtgtgtatatataaatatgagagttaacaaaagataactcagagctgacttgataaatacactgattaaaaaaacaaacttcatctgaattaaatttaaaagagtttaaactcttgagcaatggacaactcacaaattgtgcagcctcctgagtcagagtaggctctgagactccagtgcagtcacgtggtgaaataagatttatggaaagaaaaggaaagtgacatacaaaaagtggaagtgaggtaaaggaacaactgaattggttaaagctcagtgcttaccttatttaaacaaagctcaaataactggctacatttatttggccaaaacgtggcgactggcccaagtgtaggctatggtctgtttacacctccacttgccaaagttcatgatgtacagagaaacttttaggccaaacttaaaacatgtaggaggtagctttaggctgaacttgatttaacactacacaagtacactgagaatatatcataaacctttgtttttaaattaagtctattgtcttatcaaattttaatatcccaatagagcatcatgattgtgaaaatgataaaatttaagtaccttgttagtattaaaaattgctttaatataaaaaatttaattgtccatgtattgttctaaaaatataaagcacaatgcaaagcaatacttattcaagtaaatttcctaagacttgataaaaacagggatcgcctcttaccttgcaaacaaaaactgccccctcatcccctccgaactcagcgtgtcagaattttactacaggtagatgcagacaagaacaactatagaataaaccggagaggaaatagaaaacctgaatagacccataaaaaacggaaagactgaattactaatcaaaagacaacccaccaaaaaaaaagcccaggccaagaaggctttgttttagaattctacaaatcattcaaggaagaaaacataacaattcttcaaaaaacaatcctcctaataayagaagaggagaaaacactaccaacatatttcattgaccccttctactaaaaccacaaaaaacacatcacaaaaaatgaaaactacagatcaacagctcttgtaattatagacacaaaattccacaataatatcttagcaaactgaatataagaacatacaaaagttattatataccacaaataagtgaaattaatctcagcaatgcaaagttactttaacatttaaattattgatagcacctgttgggaaactcctctgccctcacaggctcagaagtgcctgatcttactgcctggcttcttcctgatgtcagtgcccacttgatctcatagcaaagttgggactgagcctaggcaccatgagtgacagcaggaggcagactgattcctgggcaaaagggggtgggtccccagtgatccccatcttcaggaccggggaaagcctgaaggctggggactaggttgcctgtctgtcccatggaccgaagtgggaacttgtggtgcctcttctgggcccacccatggctgctcacagaccaattaacttgcactttctccctagtgaggcccattaaaactatgggttcagccatagctgagcagatgacaatatgaccagctgcagagaggaactaccttctcagtggagagcttctgagacctgcagagacatcgggacaacaagctgcagagaggagcaacccactctaaggcctcttttcagctaggagctgagcagacatcaggacaaccagctgcagagaggaaagtcggagaattcctcgagcccaggagttcgagaccagtctgggcaacatacagagaccctgtgtctacaaaaagtaataataataataataaatagaagtgtgcagaggtgcatgcctgtagtcttagctattcttgaggctgaggcaggaggattgatggagcccaggagtttaaggttacagtgagctgtgatcacacttccacactccaacctgaaaggcagagtgagactatttcaaataaaaacaaaaaggaagaagaagaagaaagagaggaaaactcaagcaaggagagaagttcagatgctccaacccctaaaatataataataactaactttctaatatgtacaacacaactatgatctttgaatacttatgaaatactctttatttttttattctacgtagctttttataattacctatactatttttggctgcaaacctgaagttatttttaacactcacataaaaactaaattttaaaaatttgtaaattatgcactagtttatgatgatttcctggtaattccaaaatcagtacctcattatggtactaggcatktaccaaatggcttagctatagacaaccatattaaacactgctgtcaatgctttggagtatgtcatcgaagatttaacagtctttgaataaaatttagcatcattgcattttagaatttttttcaacagcactattatttataagatgccaatcattctttctcatatctaaaaatgtccatgctaacaaatgtaataatattatggatatacatgaaaaatgccacttgaaattttttatctttatatgtaattcctaagcagaattaatttatttctcatacagagaggattacatagatttgctttgtttgtaaatcaaaagatgtcagactgtaactatggaacaagtggatataagtaaactgtctcccatttcattgttttaaaaataaaaaagcttaataataaatttggaagaagagagtgagtatagtacaaacattaatttaaaaagtgtggaccattattaatttgttactcttcttcacaccagaattatgactgtctaacaattaaatacttgaatttttcatttattatctcaattgtttaagtcactatgtatgaaatattatgattgcatttaaactgatctaatgtaaaaataagtccaggaaatatagttgttctgcttacttcagtcttctagtagttctcattaattaacctgtcctattctgttttctttgtctgctatatagaaggcatttagtagggttctcagtctttttagaattctaacaaatatggtttaatttgaatttgactcagaacaaagtattttctttatataaatgatcacatggaaatttgatgacaggaaatcagataccttagtatcaatacttcgctgtatagtgggtagtccagaatggccttggtgagactctgaagaacaaagattgaaaacatggctaacagccaatcatgatgaaaatacttcaacagaaaaaaaacagattcaccatttattatttaaaaactcaaaaataaaatctagcatgtttatatttatgttccagtcctgggggaaaaatacaattaattacaayagttaccattttttttatacacagttacgttctttatggctagaacaaattatctttatttctatttcaactgtagttacctcttaaacaataaaagttcaataattttctaggttgtctgtctcctaattcaatcattacaaacaccctttctccttatgtagggatatttcagttgcaactgaaaaataacagcctgtcttttatttccagtgacagcattttatatgggaaaaaatccccagtctttatcatgaagtggtaacacacttcatactggagtgtcgcctatacttcactttggtggttttagtggaaatgtttatcagaggttctaggctagtgcataagttttaaaatagtcaaaaatgaaataggaattgctgaagatggtaacaacacattataaagaagactgagaacaaagttgaagcagggaaacataaatattattagagtactgtctagttttcaccatgtttatgccagtctttcagcatgagagctcatcaaatgttatttttctggataaattttatttggtatatataatgtatacgagatgctatcatcagatgcaaatatgtagtgaaaaggttgctataatgaagcaggtaagcatgtgtcaatcatctcacattagttactcaatttttttattgtttttaaaactcttccaaaatgctttattttcagtaaattggcatgacataatcaatcactagttcctcttctatttaattataaggaaataattatgatgttaatatttttaatcccatcactgatgaattgtaaaccactacgcctttcaaatttacctgtttaaaacaattgaaaaaaataagatactagtataaaagtgaccatattctttgttattgtggttgtggttgcttttgtctcatttgaaataattataaaataacgggcttgaaagagataaattggaatatttctgtttaacagccaaaatgtctgaaaccagaaatttgttgtttttaaattatttcagtacacacaataattttagttatgctattttattaatagttacattaacaaaaattaaataattttaatatttactattatgtttttaatattaattttaataaactcattctggtgttgaaaaataaagataatttttgaatagttaacacatattgaatgtatatgaaatgacatgcattgtattggttctttgtattatgtaacttcttgattatagttttttacaattgtattaaaaacataaatcaggattaatgtcaccctctgaaaaacacagtcttcccactgtgatctttaaataacaagaacagaagttacctccattgctattgctacagtgctatgcattaacacttcataattttaacttggtaagcatatacttatatccatccttattatttgtctattagtccataattattttaacactaaatgcctcaaagcattcaatgcaatgtctcaaagtaaaatattgaactcttcttaaattctaaaatcaaaatacaacaagaaaaaacggtgatagtagcaaacatttactaagaatctctttatgatgagaataatttcagcaagtattctaagaaccattgcatggctactcacaataaccagataagaaagatatatgatttttattcattcaatttaacagtaaaatctaggaagagatgtgctttttttactcatagtcagcatatatatatataattgactacagtatatttttcagtatttcrttataaaatttgcatacaacgaaatgcatgtatcttcactatacattttttgagtttcaacaaatgcttacacctctataaacccaaacccataagacattattatgaccacacaaatgtyccttcatgcctctttgcagtccaactcagcccttgcttcccagaggagattgttttagaatatcttatatatgaaattatgcattcagtatgtactcttttgtggctagwttccactcagcctaacatgttttggattcatctgtattgttgcgtgtcacagatgtatatgagtatactgcatattctgcacctcgtttgtttattcattctccaattggtggatacttggattgtttctacagtgtcttgtgagtgggagttttcactgttgtcatttgtttatgaagtctaatttattattttattattttttcttttatgctttttctgtaatctgtctaagaaagctttgcctgctgccaagtaatcaagggagatggctcctatttttctctaaaagctttatgtttgggtttggtaatccttttcttttgttttgagacagggtctctctctctgttgcacaggctgaaatgcagtggtgacattgaagcttactgtaacctctgactcctaggctctagggatcctcccacctcagcctgctgagtagctaggactacaggaacaccacaacactaggctaattttttaagaagttttttgtagagacaatttattctttatttttaaaattttttttattatactttaagttctgggatacatgtgcagaatgtgcaggttggttacataggtatacatgtgccgtggtggtttgctgcacccatcaacctgtcatctacattaggtatttctcctaatgctatttctcccctacccttctaccccctgacaggccccagtgtgtgatgttcccctccctgtgtccatgtgtactcaatgttcaactcccacttatgagtgagagcatgcggtgttttattttctgttcttgtgttagtttgctgagaatgatggtttccagcttcatccatgtccctgcaaatgacatgagctcagccttttttatggctgcatagtattccatggtgtatatgtgccactttattcaacctatcattgatggaaatttgggttggttccaagtctttgctattgtgaacagtgccacaataaatgtacgtgtgcatgtatcttcatagtagaatgatttataagcttttgggtatatactcagtaatgggatcactgggtcgaatgatatttcttgttctagatccttgaggaatcaccacactgtcttccacaatggtagaacaaatttacactcccaccaacagtgtaaaagcattcctatttctccacatcctctccagcatctgttatttcctgactttttagtggtcaccattctaactggcatgagatggtatcccactgtggttttgatctgcatttctctaatgaccagtgatgttgatctttttttcatatatttgttggctgcataaacatcttcttttgagaagtgtcttttcatatccttttaataagacaggtagatgtcagctcaggattcaaactgaggccatgtgctttcatacttttgaccactaacccactgttataatgacaatactaactcctggtcaatgccaacttcttatgagctttgccttgacctgaaccttgtcatggatttgtctcctatctctagtccttaaattgcaattttctgataaataaaaatttacttttcctgttctttgcccacattttaataaagttgtttttttttaatttgtttatattcattatagatgctggacattagaactttgtcagaggtatagtttgtgaacatttggtaccattctgtaggttttatattcagagtgttcatagtttcttttgctgtgcagatgctctttatttttaccagatcccatttgtcatcatttgtttctgttgcaattgcttttggcatctgcttcataaaagctttgcccatttctatgcataggatggtatttcctagccaacaagcatatgaaaaatgctcaacatcactaattattagcaaggacatggaatcaacctaaatgcttatcagtggtagactgggtaaagaaaatgtggtacacattcaacatggaatactatgaagccacaagaaaagcaagactatgtcttttgcaggaggaatatgatggaagatggagcacattatcctttgcaaattaatgaactaatgcaggaaaagaaaaccaaayactgcatgtcctcacttgtaagttggagctaaatgattaggacatatgaacacatagaggaaaacaacagacactagagactttcagatggtggaaggttggaggaggtagaggagcagaaaaaataactattgggtactaaacttaatacttgggtgacaaaataatctgtacaacaaaccaccatgacacaagtttacctacataacaaaccttcacatgtaccccaaacataaaataaaaattaaaagaaagaatattactttttactttttgattgattgttttaatatatgcggaaagtagagagactttacaagacattctgaaatagaccattctcaaatggtagcataaaaagttccatggaggaaatttcaagggaaacaggaataactggtgaaaattgttttttaaaacaaccatttggtgtccctggcaataatcctaaagrcatataataaagtaacattcactgaagaaaatccagtaatttgtagtgaaaacagcaagtgtctttggcatttaagccacaacatgctcatttgcmccccctcctagttcagtgacagaaactccctctcttccagggaggtgctgatgctaccayagggctctcactcttcaaagctcccagttgagtgtcagggtatgcagttgagaaaaggtgtctctctgatttttttatatatatagactcaggcatatgctccagaagcttaattctaggcaagtgtggctaagaagggtctcacatctttcattcagccacagtcataactcagagattcaactcaagaacggcacaaagaatactgagtaccaaatagccattgccccagtccactcataggatggaatttccgtgatgggagagaaaaactaagaataaaggccagcaaaggtggcagcctgccactcccactgagagctccttcttatggaggtgcaatgccgctattggtggcttgctggaattttaagccagtgggtgctcacctgtgaggtgctgtgaaagtggggcctgcaggctgtatcttctcagtcccttggattcagcctttttcctagggatatgtatgtggttctaatctcctaatttgccaaagctgcagttacttttgccagaaagcccacatagctaaggttccagggtcacctcgcatgcctgagtagatgctctgctgagactccacctttttctggctgtcagaatgaaggccctgttgatgtgagttcacaggtagacttcttgacttgagggttgcaaagattcttgggagaagtatggtttcctgtggttgcacaattactcaatgcttccctgggagggtggggttcccctagctgcttgttgctcccaggtggaccattatcctgtcctgtttttctttaatctctgtgggtcaagttattttcttgattattctcaatgcaagtccctggatgtttcacttgaaagtgttgtatttacttgctcttttcattactctccatgagagccatgcacactagtaccttctagtcaggcaccctgaacatgttttccaactttcattcttaattcctttcttccatcctcagcatcatatctttcttggatgtcaaatttttaattttttcgatcatgttatttttcagaaaaatagaaataattatattttggaacatagaaagttcactgatataatttggctctgtccccatccaaatctcatcttgaattgtagttcccataattttcatatgtcctgggagaaatccagtgggaggtaattaaatcataggggcggttaccctcatgctgttcttgtgatagtgagtgaattctcataagatgtgatggttttataaggggctttccctgctattgctgattcttctctttcctccatccatgtgaagaaggatgtgttttcctccccttcagtcatgattgtaagtttcgtgaagcctcaccagccctgcagaactgtgagttaattaaacctctttcctctataaattacccagtctcaggcagttattaatagcagtgtcagaagaaactaatacagtaaattggtaccactgagagtggggtgttgctgtaaagatacctgaaaatgtggaagtgtctttggaagtgggtaatagacagaggttggaacagtttggagtgctcaggagaagacaggaaattgtgagaaagtttggaacttcctagagacttggagagctcagaagacagaaagatatgtacaagtttggaactttctagagacttgtaaaacagctttgactaggccggtcatggtggctcatgcctgtaaccccagcactttgggaggcagaggagggcagatcatgaggtcaggagatcgagaccatcctggctaatgcggtgaaaccccgtctcagcttccttggaacatacatttcagtggggacacggtcaaaccatatctttctgcctctgggaactcccaaattttatgtgctcacatttcaaaacacaatcatgacttctcaacagtcccccaaagtcataactcattctagtattaacccaaaagtccaagtccaaagtctcatctgagacacagcaagtatcttccacctatgagtctgtaaaatcaaaagcaagctagttacttcctagatacaatggaggtataggcattggataaatacacccatcctaaattagagaaattggaccaaataaaggggctacagtccccattaaagttcaaaatcctatagggcagtccttaaaatgtaaagttccaaaatgatatcctttgactccatgtctcacatccaggttaagttgatgcaagaggtgggctcctatggccttgagcagctttgtccctgtggctttccagggtacagcccctatccaactgccttctctggctgctgttgagtgcctgtctttttcaggtacatgatgcaagctatcattggatctatgattctggagtctagaggatggtggccatctttttacagctccactcagcagtaccccagtggggactctgacaccacatttcccttttgcactgccctagtagaattctccatgagggctccacccctgcagcaaacttttgcctggacatccaggcatttccatacattctctgaaatctaggcaaagattcccaaacctcaagttttgacttctatgcacctgcaggctcagcaccacatggaagctgccaaagctcgaggcttgcacactctgaagccatggmctgagctttaatttagtctcttttagctatggctggaacagctgaattacagggcaccaagttgctaggctgcacacagcagggtgtctcttggcccagcccagaaaatcatttttccctcctgggcctctgagcctgtgatgggagaggctaccatgaagggctctgacatacactggagacattttccccattgtcttgttgattaacattcagctcttcattatttatgcaaatttctgcagcagggttgaagttctcccaagaaaatggagttttcttttctattgcatcactaggctgcaaattttctaaaattttatgctctgcttcctcttgaatgctttgctgcttaggcatttcttctaccagatagcttaaataatctctctcatgtggagctaccctctccagggcctcccctctgctgagagctgaaaactgatgggactacctgcctacagagaggagctaaccactgcatacctcctctgagctgttctaacgctccataaagctcctctttgtcttgctcacccctcacttttctgtgtacctcattattcctggctgcatgacaagaacttgggcaaaggtgccactggccacagatgtttctgagcagaaaagcaacaccccaaagatcctgtaacactttcaattaatgtaatacacaatataattataatgaagaatgagaaattcattatcatttccatgaatgcacaaaaaaattaatgaaatccagtatctttcatcataacaatattcaataaagtaggaatagagggaaacttcctcaaactgttccctgacagaacaaggtccacctgcttgttctcatggtccagtaacaagaagcagacaaagtcagaaagaggggagtttatttatgcaattggttacagggagaaggttgcagtaactcaccagatcaattcaaagttacaagtgtttttctagtgcttagatacactttaagctgcatgcctatgtgtgggagtgcacctacaagaaggagtgatttattcaatctccatctaatcttatgaggtgtatgtgtaaaaatgctattattattctatcagactgtaggggctgtgaaaaccaaggtggggtctgaatgggtttgttttctcatcccagtccttgtactcaggtaaaactttgtctagttctttaatgcttaacttatggattcattaaaattatagttaaggattagtgaaaactgactgttctaattgttgagggaaacctagcctgacacaaacctgataagtgacatctataagaaaacacatagctagcattatacttaatgtagaaaggctaaatccactctctctactcctaatcaacatcccactagaggttctagttaagacaaatagacaagaatatgaaataaagtaatctatatagggaagaaaaaatttaaactattggcatatgacatgcttttatattgagaaaacatttagaaatctactagaaaaactttagacttgagagatgaagacagctggacttctgggtagattgggaacttggataacttttctgtcttacaagaggattgtaaaacgcaccaatcagcactctgtagctaggattctaaaacacaccaatcagctctctgtagctagcaagccgattgtaaaatacaccaatcagtgctctgtaaaaacacaccaattagtgctctgtagccagcaagaggattgtaaaatgcaccaattagtgctctgtaaaatgcaccaatcagcagtctgtaaaatgaacaaaccagtgctctgtaaaacgcaccaatcaacaggattctaaaagtagccaatcgcagggaggactgaaaaaagagcactctgataggacagacatggaacataggagaggtcaataagagaataaaacctggccaccccagccagcagtagcaacatgcttgggtccccttccacgctgtggaagctttgttgttttgctcttcacaataaatcttgctgctgctcactctttgggtccgtgccacctttaagagctgtaacactccctgtgaaggtccacagcttcatgcttgaagtcattgaaaccacgaacmcaccagcaggaagaaactccagaaacatcttgggggctcatccaggatgttgccacacactgagtgccatcagaccccttttgcttggtattctgtcctatttttccttagagtttgggggctagtcaccgggcacctgtcggccagttaaaagtgactagctcagccaccagactaaaggcatgagtgtcaggctttctgggaaagagctctctaacaacccccaactctttagaggcaggagtgttggtttgctgggaaccagcttctgcttttcctgtacttctgggctgagctgagagtcaacggacaggaaagccattcagctccagggtcctgaaaaaagttggttgaccctgcagctataagcrtaactctcaaagttatgtctcccaagcaagactcgcccatctatcctatctatcctgacccttgcctcctgggtcctaatgcctgtcaaacaaacttcttcttgcctcttttctccgaggctagtcccacttctaaacaccaaatctagctttgttacctatgcaacaaagctgcacatcctgcatatgttccccagaacttaaactttggaaaaaaagaaaaaaagaacaggaaaagaaaatttaggttccctagaagacactacctccaaaaagccttcatgtcaatttccttggccaaggatgctctaggatacctccatcttacctcttaggcaacaggagaagaacttaaggaacagccagatcactttcctcccagcttaatacattactgactaaattaaagtcatactttattttaaattaagaggattggtcacgtgtgtggctcatgcctgtactcccagcactttgagaatcccagactggtggatagcttgagctcaggagttccagaccaatctgtggagcactggacaactctgtctctacaaaaaatataataaaataaaaacaaatgcagaccgagcacactggctcacacctgtaaccctagttttaaaaaaaaatgaaggaatgaggtgcatgtgtcattgttaaaatgtctatgtctctttttatctgtttttgctttatgtatgtgaggttttgatgatgggtgcatatgtatttataatttttatatattcataatgagttgacactttcataataaaaaatgttcctctttaataacattgaacaagaacctttaatgtctgaaattactatagccactcatttatttttgttactatttgcattgtatatacttttacatcattttatttccaactgcttacatctgtaagtttatacagtgtctctctaggtagcatatacttggaattttttaaaatattgtctgtaatattcaacttctaataggattttttaattaatttatatttagtattgctcatacagctggatttatgtgttgtttgtcttttttaatacattatatttttatgttcttcttttacattaatttatgttttaaatgtaacatttccatctctttaataatttttatattttttccgttatttactttgtgagtaattgaggacttgccatatatacacattaaattattagaataaactttaaactcatactaccttacttcctatataaaaatattacctagacataactccattccctcttgtaatttgtgcgactattgttatattacatttacatgtgttacaaacctcacactacattattatcactttatataattttatgtcttttcagaagcaaaaaataattagaaagcagatatttgtttatatcattggtcacaatttctttttacttaccatttctgattctctcttttttttgtattcaggttaccatttgtttttatttttaccccaatacagttttcacaaaactatgggttggtttggattcagaaagactctttttatctgtctgtctctctctagttttgtataatcagctaatttgcatctttcataaagctatgttcttctttatattaataactgcctaccaacaaaactttccatattttgaaagtactcttaggcttgaacttctacatattgattcaagtaaagtaaattactcttgcaagtgctttacaacactcttttgaatggtctgactccttccttgggcaaaatctcccattggtgttagaactggagggcagggacaatggaacacttctctctgagtgacatctgtgctcaaacagaaaaataatagcccttacgtttagtttgcatctccatcatggaaccaccatcctataaataagttttggctataattatttggtactcagattctcagtatgccattcctaagtaaaacttttgcttatgactgtggttggatagaagaagagataacccgtttgacttaactagcctagaatttaccctctataacacatcgattgggtgtgagtggaagagtttaggatgatttcctctctacagaagatacatctccctcttgttggagttttgtagatttgaagccctatcatctttgtctgcacctatctggaatggagatttagtcacactgaattaggagggtgagtgaggaaaaataaggttattgtttaaatgccacaggctcttactattttaccaagatttggcagaagtttttgaattttttttccacatatgatgaggataattcctagtattttcaaatagttttattttgacaataattttttactagttattcttatactggggagctggttcatgggttcatagcatttctcacactatcaatcaggaaggggctacatcaatgttttctcctaacactttttgttccttcttgtgataaatttgcttaacatagttactaactcagcatccaattttaggcctgacgtaagttgtttaacacctagtgatagcagtttttcttttctttctcatgtgttgtttgtgatatagttcatttgtttcttgttccactgaccccaaaaccaagcacactttataactgatgatcatgatataacctattgtcaacatgagagttgtataattagcctcctccctttacatattttttaagtttataattacatgttctttaaattagccattctaaaactccctcataaaatctaagggttaacactcacagaacttaataaaggaatggcttcataggccttctgactcttattttcacaccgcttgttgaatttcctccttcctatgaatgccttgttagttttctgtcatcaacccaacccccctggacctggaacaaatttcttttatttgatgcattttggttttacttcctcaatgtgtcttacctaacacataaacctgaacccacttctcctctcttctggtcagcactctcctaaggagtggctatctcggctatggccagtctcaagaaagatacttcaataccaaatgagaaagaaactacaacagtatatatcacaacacttctgtgtatatttgagaaaatattaattatgtaattaaagtagaatttctataaatcagataattgttaattatgaacaaataccatatatgaaataaagaagcaacactcttggttgatgttagaaacttctttatattttatttcattctattttattttatatgctttgcattacctaatgggctatagaatgatgaaaatacataatgtcaagctgcagaagctggagaatggggaatgtgacatgactgtctaatggatttagagtttccttttgtaataaagaaaatgctctagatgtagatactggtgatagtggcacagcattgcatatgtattaaatgccaacaaattgcaaaaattaagtggttaacatggtgatttttatgtttataatttctaccttaattgaaaaagaaagatggtcagatttgaccagatttggcccagaggccattgtttgccagcacttggttgatatgataaatttaatttccacatatttgaaatagtaaatgctgtttttaaaaatttatattagaaacgtgtcatgtttaaaaataaattcatacaattatttgaacaataacattattgtggaaatttttctctgtctaataattatgataattagtttacattatattttgctatatatgtcactgtatttggtgctttgccatattaatgaatttattctcttaacaacttcatgaggttgataatgtcatcataatccttatcatttcattgatgagggagctgaggcattgaaaggttaattaatgtgcccaatcccacatcattttgtagtgggatttggcagtgacttgaatcaagccatctttgggtccaaagtggaaactcttaaccaccatgttatgctgactcttctatctgggttacagttagttttaaaatataacatctacattttcccatttatgtagctatatattaaaagtaatttattacaaatgtaaaatatatagaaatattggtaccaccgaataacaaattgcccttaaatttaagccataaaactacaatatttaattatctcttacagtttaggcgttggcttggaacaattatgtgttttttccacatagtttctaaaactatcaggatttcttagtctatgtgatatatatgtatatcatttattttgtttttccacaaaatgttatttatcatagggacttcagatatggcaccaagctttacatttagttgaggaggtatgggtagtagcaagatagaaagagacggagatggagaaatagaaaagagacagagacaagacaaagagacaaagaaggaatgtatgcttttctaagagagccttgaaagttaagctatatcacttctactgcattctctttgttgaaacagccacaaggtttgccaaagttcaaagaaaaacaatatgacttgacagaagtattgtcaaagtatttgaattatatctcaaaatcaccatatataaaacctgttgaagtacgcagcagcagtcactaagttaytgtaatatttattgtatattgacatagaaatcagaaaaattactaaaattttgtgaatttagatttctataactgctaatattttttaaaacttttaaatatatttatttatagatgtttaaatataaaatagatgttcacaaatgggccccacatagaggaaataaatactatcccagaaatatcttgaagatattgacttatagccatttaagtgctggaggaaacatcctgttcatacatgtgcttacgtgcaaggatttctgcatgacagatttctagatgtagaacttcagtttcaaatgatatatttaaatttatttgaaaagattaatttacattatacttcttcaagaatagatttctcaggtttttataggttgcaaatattttgtaggataatgatttattgacctcatttttgttttcttaaacatcaataacttttgtcattttttataattattatccatttttcattgaatttcctgtttacacacaccatcaaatttcatattggactatatccctcatacttcacttaaagtttgtcagaaatttccagtatttttaccaaaaaaaatcgttattaaaagctggtgattaagaatcactgacattcaggtgtttggtattgtagttggaatttctgtgaaatgggccagagactcccatttgtaatacagaattatacagtaaatggttacatagctgaatgatcatatttctcaggtcaaggtttaggtaggacacattttgccctgaaatcacacagctaaattgatgtgctatttgtaactgggtgtgaggaattctcatcatccctttactatgtctcacagggagtgcttgcaccttagtgggagaggcttccaggcctttctccagaggagttctggtaactgtcttgagtagctttctcacattatattcaactcttggtgaagatgtgcttgcctggaattgattgacaattattctgacttgtggttcccagtctatgccaatttttaaatttaaatattttcaaatgtaatgattggggtaaaactttttcttaagtgttccttacaaatgaagaaagaaaatattgactgtgcagaccacaaattgctgagtattttttaaaatatgatttttaatcttaagacctcaatgtcaacacgagagtcattgtagtactattccagrtaatacatggtatattcaggtattgcatgtgattgcagtaacttgtagccacatttaatgtaacttgtattcagtgttttgtctcactggcctgatgcccagagccttcttcatctacccagtgttaaaataatatatcctctgtttacagattcatcactgatgtgggctatttttttcccattctgtgaaaactttacaaaagtaatacaagatcaatgcaagagccgagcacggtggctaacacctataatccttgcactttgggaggccgaggtgggtggatcacctgaggtcaggatttcaagaccagcctagccaatatggtgaaaacccatctctactaacaatacaaaaaaaaaaaaaaaatagccacgtgtggtggtgagttcctgtaatcccagatactcgggaggctaagacaggagaatctgttgaacgtgggaggtggaagttgcagtgagccaagatcgtgcacggcactcccacatgggtgacagagcaagaccccatttcaaaaaaaaaagatcaatgcaagaaattttataaacatatgaaaagttttaaaaagaaaataaaatgctcctataatttctgtcccagaggcattaccaatgtaaaaatggtatatgttcattatggtttttattttatttatataatataatgtacatatgtgacatttattaagaaaattttaatattattgcatgtaccttttcatcttwaaataagttgacattttgctatatttgtcatttagatcctcagtttccagctaaacttgtattatgggtgccagtgtaattaaataacaatatttgtttgataaaatgattgtgatggtatgacatacacagagtataagtattccttaatttaagatgtttggattacttccaatgtttatattatgaatatcctccataaatattgaatatatacatcttgatttattgttttctctgcatgcttttatataacatattatgactccartgcatttttaaaacacttggtactttttgccaaatatcttattcttttaaaatatacagaaattttaaaagaaactcatattcaattgaaaagcaagcaattaggggtaaagtaacaattgatttatgtaataaagaattagagaacaggtttcacaactattgacttggattcaaatcttctttctgcaagctaataacagctattatcagtaattatcatgagtgtactactagtcattctttttcttgttctccttctccacctactmtctttgccttcctaatggcactatcattttccttaatgagaatgggaaaacctttcaagaatagggttagataggggccaggcatcgtggctcatgcctgtaatttcagcactttgggaggccaaggcgggaggatcacttgaggttatgagttcaacaccagcctggccaacatggcgaaactccatctctactaaaaatacaaaaagtagctgggtgtggtggcccactcctgtaatctcagcttctttggaacatagaatatgtgtgtgtgtgtgtgtgtgtgtgtgtgtgtgtgtgtgtgttacgtagttttgcttttcttgaccagatatgcatatcattatgcatagaatatatgtccacttgaaattccctcttcccatttcagtaaccgcaggtaaaaggaaattctctcacagtggtatcattttggtgtgtggaaggggggtggtacagtccaaaataattattcatcttaccaatcataagtttttcatgtccgtgagtcttggggttttctccttctctcttgagatctggtgaattcagagtgacatttgtgtatttggatagctactagttgtacttttgtgggggaattgatgtggggtttttaaaattttattattttgttgacatcacaaaatgccagcaaattgacacttgatattgttgaaatagttttatgagtttgcaaaccattatgtttttagaatttgatgtctattaaatattaaatgagctgcacatttctcacttaaatgttctttataattatttggttgtgtgctttttctagtaaataattattatgtactgaagccatatgtttctaacacaaacttgaacatttctattctaaaatgcacctcagaaaatagggatgatataactatatatatgtcaacttcaaaattttattttagaagtatacataaactatattattctatgtggcattgcatctttataatgaagaaagtttttcctctgtaggaaatggaagaatttgtccagagctctgatgaggatggtgttgttgtgttttctctggagtcagttgtgcaaaaccttacagaagaaaaggttgatcttatcacttcaggcctggctcagattccacaaaaagtcagtagaacctccaatccttataagaagctattcacacaatggagaaagtatggctttccatttggaatttgaatctcatttttcaatttgcataacaggcattagatttacataacaatttggaaagcattatggttgtgtatgtggacacaacttattatttgcctagtgatcttttctattgctttagtaacatatcccttgcttgtcatttgttaataataaaataaaaatagtgcattaagtccctattccacattgcaggatttgaaatcttgagacatattctgatgactccaaaggaaacattttaaatacgttagctcaaatgaacataaaaattggggaatgatataagaaagagaagattcatgctcaatagtattctccacgtatttgattgtataggaactctattcagtgtatttgaacataaaagtagaagcatagatttatgtagtctttctaataaactagagttttcctatagttaaaaggtaattatgattttaatattatagtctaacaacctgcatgtaattctttatgatattcaattaattttgttattactgtaattctagttttcctctctttagttagtgctatatatacactagcctagaggtttttttttttttaattttatgtttagttaaatttcaaaacactcaatgaaagcaagtatgctaattagaaatgtgaaattggcttagtcatgagattctctttttgggagttcagaatatccatgtaatcctttgttttcaagcatatgtttatcatatacgtttccagaaagaaaaaagtgtggaactaaggtacaaatacaaacaaaatttaaccttcaacaatgaaatataggtaattcctgtctctttgttttttaattaaaaataaatgaaataaaggagataaggaagcatgaagagaaaagacaaccaactatccaaaaccagacaaaagccaaagcaatgtttgtctctgggaaactataaatttgataatagagctagaatggccaagtgatttacatttacacagaagttgtgtgtctgtaagaaatttaacttccatatgctgacaaattagccaacactgcttttttgttgttgttgttatttttgtaatctcactcctagatgctttgagtttgcaggaaacaaaataataaatggtatacctaagagttgaatggtatacacccttttaaaaggtgactgtcaacagtctatttctttcagtgattacaaaagactcatataaatggtttatgtaggagttttctgaattaatttctatgcagaatgcaatatttaataaaaggtaaaacaaatgtgctattagaagttttcctcttgccttcttaaagtatattctttagtattcttaaatatattctttaacattcatattcttaaactccaatattaatgataaacattactgaataactaaagtgtgagtcttggaagggatgcaccttcctgcatcaagcacctcaccatcactcgagtgtcctctattgatgaagcttaactttcaactagctggcaaaggaggaatgcttacaggatcctgattcagtatcataaagctgtattaggatatgagggacgataaattgaaaactggtgaggcataaaatttcaaatttctcatttgttattatttttaagttgtaccctaagacactgaatcttggtaaagtttggatgagtaggaggcatgactttcttttttgaaagttgggggccatatagaggttcagacaaaggtgagcttagatttgagccactgagtccacagttccactggtggtcacttgtctaatgtccaaatatatattaaaaattgagatactagtaggttggatttttgatttcagtagttgctagctcggacctggttagagggattcttgttgtgctgggcccatgggtgcccttcacctatcaccactctattcatactcccaacaaaccagcactggagtcgccagttattttgtgctttacctatgataaatattaatttttaccaattcaaattatataatgatatataattgatttcattgttagtccctaaataataaattgattaatcactttttgggtttatgatccagtcagaaatttgttcacgtactgcactcattttatcaagtgatatttttcattagattcttctttagtatagagactttattaaggataaatttgttattcataagagatccagaatcctaagtcatcatgaccatggctcagagtgactagcaaagagacaaaataataaatgtcagataaacaagtaaaacttaatgaataatccttagtcaggtaaggtgaactttgcagttggattgatcaataataaagaggacatgcaggttgcaagagttaggacagaatgaaataaaaattgagataatcacattgaatcagggcataaacactttaacaaagcatataatgggtagttaagaccaagaaaacaactagaaacaagagagctttggaagaaaaactaatcagtaaagctttaacagaaagcaattttagattttaatcagtttactggtaattttcagagcattaagtgattcttcttgtgggctgttcagtcaatcattcatttccactttattttatgtaatcaaacaacatttcatataattagggagcacatttctgatttcaagaatatctaattatttttgtattcatccttctcacctcatcccattcttcttttatgttagtgactctttcatccctgaacatttgaatcattcttatataaaaatctcattttgtaaagttatggtggtacatacctgtaatctcatccctttgggatgctaaaatgggaggattgtttgagcccaggagtttgaaatcagcatggagaacacaatgagatctcatcactacaaaaaataaaaaattagttggacatggtgacatgcacctatggtcccagctacttggggggctgaggtgagagaacctcttgagcttagtaagttgaggctgaagtgagccatgatcacatttcaatataagtgcaacaaatttcaatacaagctcatatggctttatattattttttatttcccctagtgttttcttcattgccacagaatatttctaaccattaactgggtggtaaatctctgaaaaacaaatttttacttgacaaggtagacttcgaaaggatttttttttgtcacaggaagaaagaaatcttgcatcacaatatttattgctggaatcaactgaagtattcctatctatcaggttttccagcttcaaatctcagatataactaatccctttttcccttctttccttttctagcaaacttccagaaacaaaacagacaacactttgtgatgataaatagcacggttgccacacaagccagcaggaacccaatcacatccaaagagtggtactggaaccaggtgaggttgtgggctgcaactcgaagatgtttggctcctttgtggcgcatgacaaattcaatccagaagactgctcgatccaggggcttcactggttgatcatgttgaattcttgataatttcataatattctctttatatctgaaggataaaaataaagataccgacactgaaagtaagttaatttgcctgtagatatcaagtctatgaaaggcttttaaagtgtcaaataattcaaagtaaatgtcaaagaattgatatagaatttatgtattttaatttgagtcatcatacaaagtttggcttttaaattggacttttctcattgacaaatatttttaaagtagaaaaggaaagtcaggtgagaaagttatttttttcaagcagagaaagtatcaggcatttttaatttgtttttaattttttaattttaagtttttgtgggtccatattaagtgcatatgtttatggggtatatgagatgttttgatacaaagtgaaataatcacatcatggaaaataagatattcattccttaagcatttatcctttgtattatgaacacattccacattacactattagttctaaaacaggcatattagaacgtgctcaacatcatgagccattttaagtgctgtaagaaagatgtgaaaatgcaatctgagaattaacatctctaagttcctaaaaaggaattttatcatggtgagtgacatgcctcatagctagtcacttggcttctagattactcttttgtctcctactgtttcccaccctgtagccagaatgatgttttgcaactaaagtgagattatggcactcccctgattaagatttttgcctggcttctcattattttaagaataaaatccaactctgttatttggtctacagaaccctacattgttagacactggcaaggtctttttctaacacttttacctgcacactgtcttctagattggcctactatttttctttaagcttccaaaggtgttctcatcttagcactttacacattttatcccttctctcccgctcttggagtattctttcttgctatacccaaggcatgcttctctccctttttgtggcttccctctaagtgttacctctaagagaggcttttactggccacaatctgatggaacctctaggattttctctgtttactgtgcttattttctatctgattcctagaatttttaaaatgatttatatatctcataaaatatatatttaaatacaaaatacaaaagataaatatacgtacactaagtgaatagttcaaaaatggaagatcatcttgaacattatcttgaggcaaaaataccaatttacctattgttcagttcatggtacaggatatcacaacctgcctagaatagctctctttttctgaaccattttgtcaccacttttgtccaccaactaaagaataaccggactttgaatagcagcactagctttgcttgtttatgtaattgaattatataatatgtactccttagtgtctattttttttagtgtaaccgttcttgggtaattccattgctgtgtagtattttgttgattgataaagcacaaactatgtcttcattttatgttgaatagatatttctgttgctaacgctttttggacactgttgataattctgtcatgaccactcttctatataccattagatttatatatttatacatatctgttgggtatataattgagagtagaattgctgagataacagtgcatgcataattatgatttacttcttgactttaaatatttgaagtgtattttgttaatttccaaaatttaaagatattttagtaatagtatttataacctcccttacttccactatggctggatcatatagtctttatgatattgaatctttttatatttcctaagtcttgatttatttcccaccacatgccacttcaaatgactattaactattcaacatgctctaggaaaatgtgtcttccagttgatatatacgatacatatatgtgtattgtatatgtacatgtgtgtatatcattttacattataagattccatttgttaattgtgttcttcaaacgttttatgtccttactcattatttgcttgtttttttaaaaaagtctgtttaggttgagtgaaagtatttgtataatcacatttaaatctaccactttgttttatatttcttttctatttgtccaagttggtttgtgtttctattcaattatttcccatcttctttaaaggtgttttgatcattctttatccttctattgtctttgtgataaagtatttttagagtatttctttagatgataccctccttacacaaaggccaatgaactgataaatgaacaactaaattatgacgtatctatattaaaaaatattatacaagtgtaaaagaaattaaatattaaaacacacaacgacatgaattaaactaaaaaccataaaaaaaaattaggctaggtgaaatgtcatttacacagtaccctagactgtatgattccatttatatgaaacatctatagagaataatctatagagaaagaaaacaaattggtgttagactatgactaa

SEQ ID NO: 97409 - DNA, 21025 bp, Homo sapiens
aggaagactaatgttatttgtttatttatctttaattttgtattgttatagttctgccaaataacttgtgctcattccaggcagcttttctgtttagtcatgagaatttatttctctgcctatgagcacaaaggaaaagttacttgtgattgagaagacgttatatatttctctcaactatataatccaacacaaaacattttttcatgttcttattggacatttaaatattccttggtaaaattcctgtttagatcttttaaacattttttgattaaattatttgtctttttaacattgagctgtaagctttctttatatattttttatataagtcacttatcaggtatgtaacttgtaaatatgtacttcaaactctggtttctcttttgaccttattgatggtgttctttaatgtgtaaaaattttaattttgatgaaatctaatttatcaattttattttggttgcttcttcttctggtgtcatatctaaaaaccttgccacattcaagattacacaaaattttactttgctgtatatacagttgttttggtgctttgaaatattaatgaattcattctttcagcaaccccatgaggtcggtaatgctatgacaaccactgccatttcattggtgaggaagttgaagcaaataaagtccaagtaacttgtccagccccacatcattatgtagtggtttctcagaggcttgaatccaggccatctggatccagagtgctagctcttaaccaccacgttatgctgactcttctatttggggtacagatattttcaaaatataatattccctatttttcacttatgtagctatatattaattgtaattttattacaaatgtataatttaaaatgtttagaactattattccagttatgtatcactgcatgaaaaattgttttcaaatgtcaggccttaaaataactgtaatcattttattaccatctctcagaatctgtgtgttggttgggctcagttatgtgttccttccacaaagtttcttaggtagctactttcctatggtgcctcggtctataattatctgaagatcattcacttacatacttaatgattcaggttgaaaggctcaaagtactagtgggctaccaggatttcttaggcatatatttgtgtctctctgccaaattgtcatttattatggggactacatattgaattgaggagatgtggagagaaaaagagacataaaaacaaaagatagaaagagagagagagaagcggagagggaacatgttgtttccaacagaactttgaaagttaatctgcattatttccactgcatcttttttgttgaggcagctacaaggtctgccaaacttcaaagggaggggatattacttgacaggaaaattgtcaaagtatttatagtcatgtcacaaaatcacaaccattctaacattttgaagaagacagcagaagttattaagcaattgtaagatttataaaatattaaatataataaaagaaaatacaaaaattttgtgaatttagatttctacagttcttgcaattttttaaacattgtgttatatttatccataggtattttaaacatggaaccagtgttctaaaaaaaaagctgcaaatgaatgaaatagcatgtgagaaacctgatcaattcaaattttttgaataacactaatgaattaataaagagatgttaatttttagagcttcctgtattgattttatgtatttatttcacaaattaatttttgaacctcataaataatatatgaaaatattgtaaaaagttaaatgctgcagaattctgtagaataaaatctaaaattcccatccttggatttatgtgtactctgctagatttgtttttccttgtacaagtttacatatattttattttatttcattgcaaggaaggctttttttttctggaaactattttttctatttagcagtggaataaactgttccctacaatggctacactcacacatttgttggaggtatgtgtgttcattgactggagccatttaagtgctggaggaaatattctgttcatacatgtgcttatatggaaggatttctgcatgacaggtttctagatgtagaacttcagtttcaaactgtatattgacattttattttagaaggttatttcacattatactcccgcaaaaatagatttctcaggtttttataggttgcaaatctttacagcattaattttccattgtttctattttcctgagcatcaggtactttataatctttcatatgttttcagtgattttgctttgaagtgcctatttatattttcattaagtttttatattggaacatttcccttttttggttggtgattgtagttctcactaaacaatagatatccatcttttaagtatgatgtagaataggtttaatgtgaattaattcaggcttataagaatgataacaaaaattattaacatttaccaccttattatttctgtttttctttataaatgtatcaatagctagataatttgtataaaatattctcttatcaatgcttcctataatttctttaacatcaatgttttagtgtgtttgtgtataacatgatttatatatatatgcatacaaatacaaatctacatatctagtgatatatatatagtgatatatatgtgtgtgtgtttgtatgtgtgtgtgtatgtgtgtatatatatatatatatatatatatatagtgatatgtatttaaatcatgacttaggctcaagaatatttgttgtgagtcttggttacttatgggacttctgatcaacaaagacaactaggtttctgtcaatttggaccagtttgatcataaagtgctttcctgatgtgcagattaaaggaggtttatgtcttgatttagctattttccacaaaatttataaactttttgtattctttgtagatatatttttgttatgataaaaaatttagtgttgccatattatatttataggagggaaggatcaaaagactgtggaaaaaagaaaaaaaattaatcatgatcatttatagttatgtagaataataattattatttcaaactgtcttcaataaacacatttcacgacatacctattagatagttaagtgatgctgtgttgtgtttcaaaagaaatggacatgtatatgtacatgcatgtttaacaggattgaaaattcactaagtacctttagaatgcatttcttatattatcacaaactaatattaagaacttatattttctattaaaggacaaaaatgagaataaaacctatatgaaatttaggattttttttctagttctgttaagaatgatgatcgtatgttgatgagaattgcattgaattcatagattgcttttggctgtatggtcattttcataaaattgattttacccatccatgagcatgggaggtgtttccatttgtttgtgtcatctatgatatttttgggaagtattttgtagttttcttagtagcggttttttaccttcttgtttgggtatatttctaagtattttatgtttttctttttctttttgattcagctgctgtgaaaagggttgaattctttatttgattctcagcttgaagtctgcatagccaaagcaagactaagcaaaaagaacaaatctggaggtatcacattacccaacttcaaactactacagagctgtagctactgaaacatgatggcaaaggtataaaaacagacatgtagaccaatggaacaacatagagaatccagaaataaaattgaatacttatagccatctgatctttgacaaaacaaacaaaaacataaagcggagaaaggacagcctattcaaccattggtgctgggataattgacaagccacatgtagtagaatggtactgaattcacatctctcaccttataagatagatgaaggaattaaatctaagacctgaaacaataaaaattctagaagataacatcagaaagtcttttctagacattggcttagacaaggacttcatgaccaagaacccaaaagcaaatacaacaaaaacaaacataaatcgacgtgacttaaactaaaaatcttctgcacagcaaaagaaataatcagctgagtaaacagacaactcacagagtgggagaaaatattcacaaactatgcatctgacaaatgactaatattcagaatctacaaagagtttgaacaaatcgacaagaggaaaacaaataatatgatcaaaaagtaggctaagatcatgaattgacaattctcaaaagaaaatatacaaatggccaacaaacagaaaaaaatgctcaacatcactaattatcatggaaatgcaaatcaaaaccacaatgcaataccactgtcctcctgtaagaatggacatcattaaaaaaccccaaaataatataatattggcatggatgtggtaaaaggaaacacataaactagcacaaccactatagaaaacagtatggagattccttaaaaaactaaaagtagatctacatttttacccacctatcctattactgggtatctacccataaaaaaagaagtcattatatgcaaagactcatgcacacacatctttacagcagtacaattcccaattgtaaaaatatggaacaaacctaaatgcccatcaagcaatgggtgtattaaaaaaatgtggtatatacacacacacacaccgtggaatactactcagccataaaaaggaacaaaataatgccattcatagcaacctggatgcagctggagaccattattctaagtgaagtaattcaggattaggtaaccaaatattttaacttctcacttacaagtgggagctaagctatgaaaatgcaaaggcataagaataatacaatggactctcaggactcagggaagggtcagagtgagaagagggataaaagactacacgttgggtgctgtgtacactgctcgggtaatgggtgtgccaaaatttcagaaatcacaactaaggaatttatccatctaatcaaacaccacctgttccctaaagtctcttgaaataatttaaaatgtaagaataaaatcgaccagatgaatatttttaaatgaccagaaaaaaatgggtaaactgaggctcacggtgaaagactggctcagcagaagggtgggactggaccccagctttcctgacttttagccccgtgttctttccaccactcactcactcatttcttcatttttaatttgttttattttttggacaaacatgtattgattttcttggtatcatatggaaagtctgaattggttcatagagcaaaagactttgtaaaatagttcaatattaccgtaggaagcaggtagcagttgctgtatttctaattccatatacattccactgcgaaatgactaaagctctaaaaagttaaacattttgccataacttttaggaaaaaaactgacacttaagcagtatgcaccgtaagagccaagcagcagtactcatctcaaaatagcaaaagcaagagagacattttttatacaattcaattgtttaacagttcctttagcaacagttaaaatatgaaaatcctgcttaaaatgaggccaaagtattctgagtatttgcaaaacagtaccgatactcttaatactcttgtgtttaagtacaatatgtgaaatgtacttaagctcagtaaaaatgttttcatgtaacctgtgaatgggagcaacacatttcaatataagctcgacaaatttaaatacaagttcatatggctttatactattttataatttcgctagtactttccttctcaacaaaaagtatttctaaggtattaaatctctgaaaaacaaatttttatttgacaaggtaagtaagttttgaagagattttctgtcacagaaagaaaggaatcttgcttcataacctttcttgttagaataaactgaagaagtctcgtctatcaggtttcctagcttcaagcttcaaatacaagtacagctaatctctttttcccttctttccagttctagcaaacttccagacacaaaacatacaacattttgtgatgataaatatcacagttgccacacagtccagcaggaacccaatcatatccaaagagtggtactggaaccaggtgaggtcacgggctgcaacctgaaggtgtttggctcctttatggcacatgacaaattcaatccagaagactgctcgatccaggggcttcactggttgatcatgataaattcttgataactttataatgttctctttatatctgaaggataaatgtagagataccaaaattgaaagtaagttaatttgcttgagcatatcaagtccatataaggtttttattttgcttatttatttatttatttatttatttacttatttattgagatggagtcttactctgtcgcccgggctggagtgtagtggcgcaatctcggctcactgcaacctccgcctcctttggggtcaagagattttcctgcctcagcctcccgagtagctgggattacaggcatacaccaacacacctggctaatttttacatttttagtagagacggggtttttccctgttrgccaggctagtctcaaactcctgacctcaggtgacccatccatctcggcctcccgaagtgctgggattacaggcgtgagccactgcatccrgcccatgaaaggtttttaaagtgtcaaatgattcaaagtaaatgtcatagaattgacatagaatttgagtaatttaatttgaatcatcatagaaactttggcttttaaattggaattttatcattgacaaatatttttaaggtaaaaatggaaagccaagtgagaaaactaatttctttcaggcaaagcaaatatgagccatttcattattatttgttagtttgttaattttcagtttttttgggtacttagtagktgtatatatttatgggttgagtgagatgttttgatacaggctgcaatgtaaaataatcacaccatggagaataaggtattgttccttaagcatttatcctttctgttatgaacaatccaattatactcttttagttctcaaacaggcaaatgagaacgtgctcaacattgtgagcaattttaagtcctttaggaaagatagtgaaaatacaattatcatttttaagttccaaaaaggaattgtgtcatggtgagtgaaatgcctcatagctagtcactctgcttctaccctacccttttctctcctactgtttcctacccagcagccagaattatatttttgaaataaaagtcagattttgccactctcctgattaagatttttgcctgacttcttatcatattaaaaataaaatccaactctgttatttggtctacaggaccctgcaatgtcaaacactggcaagctcttctcctaacactttttccatgcacactaggtcttctagagacattgcccttctatttttctttaagttcccaaaagtattctcaccatagcatctttaaacattttgccccctctgtcacactcttggagcattctttcttgcaacaacccaaggcatgcttctatctctttttgaggcttccctctaagtgttacctctaagcgaggttttcctggccacactatgatggaacctctaggattttctctattgttttatgcttattttgatatttgattcctagaattttaaatacattatataacttataaaataaatctttgaatattaaaaccaaaagataaatatacacacactaagtgaataggtcacaagtattagatcatcttgaacattatcttgaagagaagataccaatttmcctactgttcagatcatgrtatatgataccacaacctgtctagaataactctcttttcctgaaccatttagtcactacttttatccttcagttaaatattagtctgacttcaaatataatacattagttttctttatttatgtaattgaattatataacatacattcattagagtctattttttaaaattttgtatarcagttgttatttaattccattgctgtgtagtattttgttgattgctaaaccacagattatgtcatcattttatgaccaatagacatwggggttgctaacgatttttgaacaatattaataattctgttataaacattgttgtatatgaaatgcaagagttctgcgcctcccctcacaagatgtgcgacagctgtgtggctcatctgttcagcccccattcatgttcaagyccgttatgggagggggagcatgcagacaggcaggtgcgggagcctgggcaagcgcccctggactgtgttcccacggcagcatccaggggtggttgtctgcagctcctgaagcccaagtgggtatgtgttagtgtactcttttagccttgccatgtactgatggcttaagtgttaaccagttcagtgccctgttagtactcaggtccttgtccagcatccaggaagaatcaggtcgcacacggacttgaaggatgaatgcatgggttttatagagtggtggaggtggctctcattgagatgaatggggagctggaatggtgatggaatgggaagatgatcttccactggggtttggccatccagcatccaatctcctctcttttccaactgtctccagctgaactactcttggcattcagaaactccttctcttctctctgatgcaccattctgccatycttctgctcttctsttcatgctgggtgtttggggtttatatgggtacagaataggggggcattgtggrccaaaaggcaacttttgggggctcaaaaacagaatgtctgttctcatttatggccatgagttttcaggcttgagggtgggacctctgctggggaactgacctcttctacccagtattttcctgtttcctgtccatgtcatatatagcacaaggtttacatatttatacatatctgttgggcatataattaaaagtagaattgctgagataaaagtgcatgcataattatcattcacttcttgactttttttttatttttaattctttaaacttttaaatttatttttatttttatttttttgaaacggaggtttgctcttgttgcccaggcaggagtgtgatggcatgatcttggctcactgcatcctctgcctccsaggttcaagcgatggctcacgcctgtaatcccagcactttgggatgccaaggtgggtggatgatctgaggtcaggaattcgagaccagtctgaccaacacagtgaaacctcatctctactaaaaatacaaaattggccaggcatggtggtgcatgcttgtattcccagctactcaggagtctgaggtggagctttaaattttttgaagtgtatatttttaatttccaaaattaaaagtattttagttatcatttttccaatatcccttacttccacttaggctgaatcatttactctttatgatattgaatcttttcaaatttactgagtcttgatttatggcccaccacaagtcacttcaaataactattaataattcaacatgctctaagaaaatgtgtcttccagttgacatatatagtacatatgtgtgtgtgcatatatatatatgtatatatatgygtgtgtgtatcatgttacattataagtttccatttgttaactgtgttcttctaacgttttatgtccttattcattatttgcttctctttttaaagtctgtttagatttaatggaagtatctgtatattcacatttaaataaaccacgttgtttgatgtttcttttatattggtccaacctgtttcatggtacaacctgttttaaaagtattcctttaggtgacatctttcttacataaaaatattattgacagcagttataaatgctgaatggatggtagctggactgggtaggcattttgcacattgcatcctayggagtataaataaatcaattactaaaaatttaacttattaaaattaaaatttttgttcttcaaaaaccatcaacaaaaaagtaaaatgttagcacacccagaatgaaacgaaatatttgaaaattrtatatctgatataagattatatccaaatataaaatagttcttaatactcaataataagatgagtagcaaaatttaaaaatgttccaaggattggaataggcatttttccaaagaagagatatggtcaataagcacatataacgatgctcaacatttttagccgtaatccacctaaaatccaatccaaaaccacaatgaaagatcatttcacactcattaagaaagctataacaaaaagataataacaggtgttggcaacaatgtggaggaatttgaaccctcttgtactgttggtggtaatgacaaatggaacaagtactttggaaaacagtttagcagttcttcataaacatgcagttcccacataagccagcaataccacttatagtatcaacccaaaagaaagaaaagcatgtttatgcaaaaayatgtgcagcaatgttcctaatagccacaattgraaacaatcaaaaggccaacgaactgataagtgaacaaataaaatatgacatatccatactgtaaaatattatagtgctgtaagaataaatgaggtattaatgtacactacaacatgaattaatctaaaaactattttaaaaaaacaaaaaattatgctcagtgaaagaagtcatttacacaacaccccaaactgtatgattctcaatggcttcatgactcataagcattctaaatatattggaattttacactttaaataggtgggttttaagtcatggaaattatatctaattatcaagccagttacaataatgaaaacaataaaaatgaatttttcagcaagaaaacagttatactgttagacattttagatatttaattaaagtattttatcatatttcttcaagtttatccttcctttctactgtggattgatcatataatttctttaaaactgtcttttttatattctctatattactttaaaattatttttgtgcagaaaattgtttcactaattggatacccattaaatgtgtggagttgaaaacacaattctttaataactgctcaaaaataaaagaagatttcagattggttacatcatttaaattctttcaaaattagtctcttgaaaaaaggatgaaactcatactattgagaagataaggtatctataaataccacctagtgaaaaaatattgttatactcacaaagggtcattaattattggcttcatgcattgaacaagtctgtacttgacatcgtgtggaagtccaatctaatagctgtgcccttggccttcatgtgagaaatgttatcaggttgatccgcaaacagtggaatccccattataggaatcccatggtaggtcacctcgtagatgccattggatccaccatgagttacaaaagccctggtttttggatgacctaggattggatgaattttagcaaaattattcataggaataaaatgagaaatgcacaactaaagactcaagtgacagtattttctagctaaaacattgaactaaattaaaatttctgtttcagacttcagaggaaggagcacttatgctggagatgtaagtgaaagctgtatggtgtgtgtgacttcagactgaaaaatagttaaacaagattaccagttagactaaagaaaaagcgcaatctaaataaaatgtgcaaaaaaaaaaaaaaaaagagcagcaaagaaaagagatggacatgtaagaatgtgttctcctaagtgcagtcatagaaygtgatatgtgagatgtgcaaggcagcaggcagtggggtggtggtggtgctaggattgaggaaggacaggtcacacttcatcacaaaatgtgtcatcactttatgattaagattaggaatttaatactacagaaaatgcagagtcactggtgatagcagaagagctgttatttttgaaataaccctgcataaaaagaaagaacaagtgtaaagttatagaaataggagacaaagacgatctatgaagttacaaaaaattctgtgagacataataacacctgaaataaaaatactctgattctgaccataaagaaggtgaatgtatatcataaaatgccaacaattatagcttattattttccccataggactgcaaaataaatataatgtagttgcattttatttttaagtttttccataatgcattttcaataagcttatttcatgattaattattaatactctaatgggatattactaatacattcagtatttgtactccagagtcataccaagaaggtcattctgtggtatccacttgtacacccaagtattgagtcctaaagcatgtggtttatttccatcaaatctccacagaacctgttacagtaaagaaaatgtcttattccatgagtagaactccaaagttatagaatgttagaactctaaagagattaagaatgagagcrggggatgttaggtaataaaactactcaaagactgatgtaaacagaatgctaacatttyattttcttaacttttataattagttaagtatataaggaaatcaagattttccaaataatagcttagaaaaatgagattatcaatgaaaagttgaagtatttaaaaaattgttatgcttttcaaaagaagacctacgtgtggccaaccatcacatgaaaaaaagcttaccatcactgctcattagagaaaagcaaatcaaaatcatagtagatactatcttgcaccagtcataatgggtattattaacccaaaaggtaatatatgctagtgagattgtgtagaataaggaatgcttatactctgttagtgggagtgtaagttggttcaaccattgtggaagactgtgtggcacttcctcaaaaacctagaggctaaaatacaattcaactcaccaatcccattagtgggtatatatccaaaggatgatgaatcattctcttataaagtcacatacacgtttattaatagcagtagtattcacaatagtaaagacatggtatcaaccctaatgcccatcaatgattgactgaataaagaaaacacaatggggttcatatacaccgtggaatattatgcagccataaacaaaaaacaagattttgtattttacagggacatagatggagctggaggccgttatccttagcaaactagcatagaaacagaaatccaaataccacatgttctcactatgaagtggaaactaaaagatgagaacacatgtgttgggaacaggcctcccaaaatctggccataaactggccccaaaactggccataaacaaaatctgtgcagcaccgtgacatgttcatgatggccataatgcccatgctggaagattgtgggtttaccagaatgagggcaaggaacacctgtcctgcccagggtggaaaactgcttaaaggcattcttaagccacaaacaatagcatgagcaatctgtgccttaaggacatgctcctgcggcagttaactaacccaacctattcctttattttggcccatcccttcatttcccataagggatgcttttagttaatcccatttcccataagggatacttttagttaattgaatatttatagatagaatgctaatgcctggctcgctgttaataaatacatgggtaaatctctggggctctcagctttgaaggctgtgagacccctgatttcccactttacacctctatatttctgtgtgtgtgtctttaattcctctggcaccactggattagggtctccccgacttagctggtctcggcacacatggaaacagagcagggaacaacatacactggggtgtattggaggctgcagggcaggaggagagagaagatcatgtaaaataactaatgggtactggtcttaatgccagggtgagaaaacaatctgtaaaacaaaccctcatgacacaagtttatctatgtaacaaagctgcacctgtacccctgaacttaaatgttaaaaaataaaattaattttaaacacataattctaaaaaattatatgtataaaaaatttaaatagtcattataattctagtgagaaaaagcagtaacaatctagtattgacctgtgttattttatgtatttatactagttttcatcttccaaattaagtattaatttattcattttttagtaacatgggaagtagttcatgtatttctgcttgtctgtaagttattatattagagtctggtgtcctctgattgataaaaatgcaagtagataaaataagctacttataagaaataaattaatgctacaaaggtagcatgtataagttctttggaattatgaattatcaagcactacttccaggagaaatttcaagggaaaatttttgagacaaattcagactattatcagtattgctaattttggttgttttttcagcactgaaataaggaatcttattcataaataaagawatagctgttgaataaattcaaaattgtatttttctgaatttggtcaaatgattgttaacacttagacaatgtgctacaaagctttgacaatagtgattaatatgttctattatagccaagacatttttatgtttaagttactaattttggaactcccaagcaatcctcatcaactgaagaataatttacagtgtttaacttttacttgttatatcagtattaaaataactgagttttcagcaaaaatgttagtataggtcattacaagaagactatatcagatagatacggaactaaaaagtaattgacaaatacacatatgtcatcattttattctatataaaagaaaatatgtttctactatgttctacggagggggcatctgaacctgttcccctgcctggcttccttctgtttgaccctttcctgtatttccttctgctgcctccactgggtggagttgttaatctcatagttagggctgcgtccttgtggggccacattttatacagcataggattcaccttcaggtcaggatctatctccatcctttctctttaatcttcctgtttcagacactggctgggcccagtccagcaggggaggctgctttttttctctttctctaaatctacctggctgggtgggaacttggactaatctgtcaacctaggccattctttctctgaatagtaccctgaacatcactcagataggcctattccaaaatgtagaggaagtatatgaggccggattacatggcaagcctaaactgcatgatgcatgttagacattttgaaatacctgctattgttattgtgctagtgaagtcacccattaaaatgtaacttcttctgataacatctgtagcatgtacaatgtccttaggaatccttaaacataaggatcaaataacaaggaaagaatttggtgatatcctgaccccaatatcatggtaataccaaaactttacctacccctcttaatatatttattcctgatcacaatattagtgccaaatgtatttatccatgaatataccctttgtattattttagcatcttccatgtatatttctgatcttgaactaatatctgataattagtgctttcccaacagctacatttctaggcaggaaatttctataattggattctttacagaatttaacagcctcttttagtagttttccataccagtaaggcactttatctatctttctgcggcatcttggcaagagctgatgcaattatatcggtcctttcttctttcatgttactgaccattaaccccagagaaaacactacaacaccattttctccagagctctggaaaaactcttccatttcctgtgaaaaaagaatttgttccatcacaaaagagtaacagcacagcaggcactactgaaaaaattggtacaaattactaaagagagaaaatcaagtattaacaggaattattggagtaaattatgtcttttaactgactcagtcactcagtttcttatcaagacaatgtataatatgaagatagctggcctctactaagggtattcatgtaaatatgtgtatgcatgcagcacacgatggttttgaatacggcccaacacaaacttgtaaactttcttaaaacgttgtgatttctcttgctatttttttctcagctcaccagctatggctagtgttagtgtattttaagtgtagcccaaggcaattcttcttttcccactgtggtccagggaaggcaaaagattggacactcttgttctataggtatattttgtgcttaccatgaggattgtataaaaaattttataataaacattgtgtaataaaaatattttaaaaaataaatacataaataaaatataaataaaataaaaatatagaattaaattattttacataattaattataaataattataaattataaaaaataaagcataaataaataataaataaaattaaaatattttaaaataacagtccattttaaaccaaaaaaacctttaattatatatgaaaactgtatttctttacatctcccatttctactttatgttagtaatatcactagttatatattttatcttgtgtcccaattaatataaatgtaatgttacttttatgcttttctcttttaaattgcatatcagaattaaaattaacttgtgcatcaacattaaaaacttatgtgactttatatttaattatttatttatctttaccagatagatttatacttttacattcattcattttgctacctagcctccctcatttcaacttgaataactcctttttgcttttcttgtagaacgggtgtggtaataattaccttcttcaacctttttttttaacctgagaaaatattccattttccattctgaatgacaggtttgccaaatgaatgtcttgtgtggtagggattttttcttatttttctttcaatactttgaatatattatgtcgcttacttttggtttaaaaagatatcctcttgtatcttgttgatatcatgtgaattcccttttatgtcatgatccattttttctttttctgcttccaatattctttgtctgtgacttttgaaagactgattataatatttattggtgtaaaatttttgaattgatttcagtgtacagtagttgtgttttaaaacaattctacatccatattttttctcaaatttgggaaattttctgcctgccattaattctttaaatagactttttgcctcaatcttttcctcttgtcccatgagggctctcgtaatgcataactggtctggttaacaatgtcccataagtgtcaggctttcttcactttattatcatattctttttgctcctctcccttaatagtttcaaatggccaatattttcaaattcatgaattattttttctagctgatcaagtcatctattgaatttctctagtaaatttttcaatttagtttttgtattatttagctccagaatttctatttggttcctttctatactttttatgtcttattgatactcttatttcatatatgtattattttcctggtttttaaaaatgtgtctgtgttcttttagctaatagagcatctttaattatttttgaaatttttgataggtatttaatatattttgaattttttgacaagtaattaatagatctttgttcattcaggctttaaaaaatgtttattttgttcctttaaataggtcatactttctggtgtctgcatgttttgcatttctttgtttaaattttgagatttaaagaaacacccacatctccaagtctttatgtactggcttagtgtagggaaataccttcatctatcaccccagctagagattctgggagcttggcaaacgtttccaagagctgtatcctctcagggcttttgaatgtaattaccaagttaaataggatttttttgtttgtttgttttcaggattttgtaatattttgctttccctcgtgccattctgtagtaataatgcagcttttttgctactgctttaaactgccacactgcctttattcccaggcattcaaaagctgtggtttctataagtgatttaagttcggtgacagaaatcagacccttgggatgtcccctaaggagccggaaaattagaccacatttcactctcctttcactcctgtgggaaatgtgatgactaaggatatttttttcctgattgtgtaatgctgtactggctagagaaggatctatagagagtatatgatacaacacttcttaagatatttcaataaaattcttcttggctttgctcttttctggggtgctgtaatcttttcactggtttctgggattatcaccatggcaatttggtctatatgatgttgttaagtctctttctgcatggggaaacagggacagggcattcttactctgtcacctttaaaacaacaattttgccaccacaccatgtgcaaattttaaagacaatgtgatgaaaatatgggaatttgctgttatttgctaggtctagaagtgagattctaggtaattattaaaaattcctttgagatttcctttgtttgcaataattgatataatttaaaaaaacaaaaggtgatattaccagaaaatttctgaaataagatgagctcaaatagcattggtttggtgactttatatcatttttttgacctttgttggatacttagaatgtgttatttaatttatacactttaaaatttataacacacacctataggattgtaatttaatttgcatctcatcacactatgctcaacctaaagtgaacatggtccaaaggttggttaatagattagtagtgtaaaatttagaatatttatgctgggagcttcttacagggaagacagaacaaacctgggcaggctcctggttagaaattgctggttaagatagaacatactaaaacggcaaggccaattggattctgattgcaactgatctcaaaattcaatgccagattgatgaaggagagtcttatgagcaacagctatcgagaggcagagagtcccacatacaatgaacgtccaacctaaaaagctccagagtgtcagcaggctcaactccagaaatggcttcccacctgtcacagcatgttaataaattactgtgtttaattacagagaaaagatgaggcttaaaacagatataatcagcttttcctagattataataatattgtaaaagtcaaaaaacatatcagtgtaaaaacttaagaaactttcaaaacagtaaacaattttatttatatttattgtatacatacacaagaaaaatacttatatttatttttatatcatcattttaaaattgaaattaatttgtagatatacctaatcaacatctgtaagaatttcaaaattttcaaaaagccagatgagccaatttatttatttaaaactattaataggcatatcactaagattatatgacagtaaaaaaatgagaagattaacatatttgcttattagtgtaaacattattacactatatttagctttgtgtagagctttacatatcaaaatatttaatatataatactatttgttatgcaggttttctaataccttaaatttttactatgtaagcaattatttgatgaatttacaattctcaaagattgagactgaaaagcagttcactgatcttactttcagaacaagcatctctttatttttctacagtaaattatacttttgattatagagataagaattatgagtattcatcatttttaaagaataaacatataaatcttctttaagtgtactatcaaataaattttataaactcagtaattatcaccacatatttcaaatagttactaatcccaaaaataatctgttcaccttgaatatcttactgacatgttctctatgtgagaaaaaaaatagtttcttttgttatttgatggcaatcatgagaaaggtctttttatcatcaagaaaacagaaaaaagtattggttgagtgatggcagaaatgtaggccatgacatctagatgaggtctatggaaatacagcaaacttttctaagcataatgccatgtcatcattattagcaatttattttctgagatcactgatgctggctatgtagaagggcttatttaaattgaaaaagaaacatcattatgtttctcatagccagctaatctcatagaacacttacctgatttgtgtggtttactgaattttgtgaattttaagttttttacctctttatatccatgtgtttgggcgcacaccaggaataatcatattgcatgtcaccctatcacttaaggttatagaagtaatgacatcatcaaaacagtcatatcagaaataggaaaatttagatgtattcatgtccttgtgtcacaaagtgagagaagagagtaaagacacctaggaaaatacaacgaaagaatgagatatactcacaacctcatgatcgtggaattctaggctatatagctaagataaaataacagaatagataatatgaaaatagcaaggttttcaccaaattctatgtggctggaattaacaggattaccccatcaggtctttcttgaatttggaaagatctattccctcttttctatctttctagttttattaaatttttgacaggaaaataaaaaacattttgtgaacaagaatatagcagttgccacacaggccagcaggaacccaatcacatctatagagtagtgctggaaccaggtgaggtcatgggcagctgatcgcaggtgcttggctcctttgtggcgcatgacaaactcgatccagaagactgctcgatctaggggctttacaggttgatcatggtgaattcttgataatctcatagcattctctttataactggaagggaaaaacacacatagaacttagaaagttgtagttttgttttcataaaagacaggtagataaaccgtagtatatgttatgcaagccaagaacatgttcagtaaaagattgattctggttgtgacatgaatattgttggttacatagtattaaacagatatag

SEQ ID NO: 97410 - DNA, 15993 bp, Homo sapiens
ctagctgtggagaagttgctaaacatccggcctcctcctcgggcacagtggatccgaggtatgtccccccaactttttctgtggcccactgtgagcatagcatagtgccttttccaccacttccccgttgaacccaagcttagtgttcagaccccaggctctgcccagacctctctgtccgcctcagtgcttggctcctatatcctgtcttctccttgtcttcacagtgctgtttggagaaatcacacgtttgttgaaccacatcatggctgtgaccacacatgccctggaccttggggccatgacccctttcttctggctgtttgaagaaagggagaaggtaagagtgggaggaaaggataggaatagggaaggaagtgcaggaagtagagaaggtataaaggagacaggagattaaaagaagagagagaacatgggagaacatttagagggggaaggtatgtttaacttgggttatatttgtagaaactatatcatgaggggttggttgggcacaagaaggcagaaagtgggggagtaggccatcataggacctgggggcctgggactttgacactaattcccagcacgttctatgaagatgtttgagttctacgagcgagtgtctggagcccgaatgcatgctgcttatatccggccaggaggagtgcaccaggtgagcaggtccccggcttccccaaatgtccagcccaggcctattttccctgtggccactggagggcagtgctggatgatggaaactccaaacctgtatcgctgggggagggggtgctgagagggctctccttagtgaaggctatgccacattcagtagcacttccgtttggcttctaggacctaccccttgggcttatggatgacatttatcagttttctaagaacttctctcttcggcttgatgagttggaggaggtaagctaggagtcaatgggaaaaatctctcccccacaagaagggctagagaaatacagagatatttgaagagtgtgaggaagagtattaacacaccagttttcttgatcaatagttgctgaccaacaataggatctggcgaaatcggacaattgacattggggttgtaacagcagaagaagcacttaactatggttttaggtgaggggaatacaacttctctccgtaggagtgggggtgggagtgggggagttccagcctaatatcttgtctttgaagacttgttggcatcctcctagtcataccctgaatgtgaaggatcaacaagggaggctaaggaagaaggagcctccttacttagtttgtggagagtggcccttattcccattatgctctccacagtggagtgatgcttcggggctcaggcatccagtgggacctgcggaagacccagccctatgatgtttacgaccaggttgagtttgatgttcctgttggttctcgaggggactgctatgataggtaaggccccaatcctttcttggctgatattccagctagtttcccctgcctcactcttctctttgccacttccttctttaccctacttctcagtgtctgtgggagctcttgtgtgtgttagacgaggttgctctcaaaacactttcacatatatggaatcttacttatttttttcttttttgagacggagttttgctcttgttgcccaggttggaatgcaatggtgcaatctcggctcactgcaacctccgcctcctgggttcaagtgattctcctgcctcagcctcctgagtagctgggattacaggcatgagccaccacgctcagctaatttatgtatttttagtagagacgggatttctccatgttggtcaggctggtctcaagctcctgacctcaggtgatctacccgcctcggcctccaaaattgttgggattataggcgtgagccaccacacccggcctatggcattctttttatctttacattatccttgtcttagatggagctagctttggctgcattttatagctgagaaagctgaggcataaaagttagggattagctgggattattcttcaggagtggtcgagactagaatcctcctgatccagtgttctttctagtagatcctaagcttcagattctcctcctgggccaggcacagtggctcatgtgtgtaatcccagcattttgggagtccaaggtgggtggatcacttgaggtcaggaattcaagaccagcctggccaacatggtgaaaccccatctctactaaaaatacaaaaaattagctgggtgtggtggtacatgcctgtaagtccagctacttgggaggctgaggaaggagagttgcttgaatctaggaggtgaaggatgcagtgagctgagatggagccactgcattccagcctgggcgacagagcgagactctgtctcaaaaaaacaaaaaacgaaaaccaaaaacaaattctcctcctgttttctcaccctgagtcagatttgttactgtgtattgttttttttatttttgtttgttttattttttgaacctggtagctactgctgttatttttgtttgtccatttgactctcacccatcctgtggtccaaaaagtgcttaaggaggtaattaaagaaataaatactacaggccatgttctgagaaaataaggagagggtttggggaagcacccaagagtagaagcaaacgattacagggggctggggttggtggctcatgcctataatcctagcactttgggagaccaaagcaggcagtcgcttgagctcaggagttggagatcagcctgggcagcaaagtgaaacctcgtctctacaaaaaatattcggatgtggtggtgcacgcctgtaatccaagctactttggagaccgagatgggaggatcacttgagccccagagttcgaggctgcagtgagctgtgaaaccctgtttcagaaaaaaaaaaaaagactacagggtttatatgggtggccaagccaagcagagatgctgtacttggagaaaagagtggggagagttgacctaacccttttgaggttggccaaagggcatccttcctagccccatacctgctcctctgactgttcttctcttgctctgtctcatcttcttgaggtacctgtgccgggtggaggagatgcgccagtccctgagaattatcgcacagtgtctaaacaagatgcctcctggggagatcaaggttgatgatgccaaagtgtctccacctaagcgagcagagatgaaggttggctgcagggagggggaaagtgtggggtgttggaaaggggccagtggctggggaggagtatccttggattaaatcctatcttttggttttcttttttttttgagacagagttttactcttattgcccagactggagtgcaatctcggctaactgcaacctccgcctcccaggttcaagcaattcttctgcctcagcctcccaagtagctgggattacaggcgtgtgccactacgcccagctaattttttgtattcagtagagacagggtttcaccatattggtcagggtggtctcgaactcctgacctcaggtgatccttggcctcccaaagtgctgggattacaaagcgtgagccaccacacccaacccagttttcttttaatagagaatttactgtgtagtaagagattcgggttttttttatttttttattttttttgagacggtgtcacgctctttcaccaggctggagtacagtggcatgatcttggctctctgcaaccactgtctcctgggttcaagcgattctcctgccttagtctcccgagtagctgggattacaggcacccaccaccacgcccagctaatttttgtatttttagtagagacggggtttcactctgttggccaggctggtcttgaacacctgacctcttgatctgcccacctcagcctcccaaagtgctggaattacaagcgtgagtcaccgcacccggccatataagagattcttaatctcccatagctctcctgttttattctgtatcctctctgcttactgactgacatgtggctttagtctccctgagggtagagattattttctgtgctgggggaggcctaggagacagagtttggatatggtttattgatgctccctgtttcctctcttcagacttccatggagtcactgattcatcactttaagttgtatactgagggctaccaagttcctccaggagccacatatactgccattgaggctcccaaggtaaggagaggaggggaaggaaaagaccatatgtagagtaggtagctaaagatagatgtttaacaaatagctcattcatcaatgagagagaaaacagaatgaatagaggttttgttggcagagaaaaatactcttcatgttaatacagacacccaaccttcttccttgaacagggagagtttggggtgtacctggtgtctgatggcagcagccgcccttatcgatgcaagatcaaggctcctggttttgcccatctggtaagaatcaatcccagtaactataactccaatgaattaaacctgaccttggttgaggtttttatgaactcttctttctcctcccaccttgcaagtcttaactaacattgttgccatctcaatctccctaggctggtttggacaagatgtctaagggacacatgttggcagatgtcgttgccatcataggtacgaggcctattgtgtagtagaggtatcctagacaaaggagttcgggacgcccactggggacagaaggagaacacttcctgttcaccataggccatggcatggactcgggtcctcaatcttttgagcacagtaatgggttctggatcttgggtaacaccactttttttgtttgttttgcctcacaacaggaagataagtaacatcacttttttcctccatcctctcacctaggtacccaagatattgtatttggagaagtagatcggtgagcaggggagcagcgtttgatcccccctgcctatcagcttcttctgtggagcctgttcctcactggaaattggcctctgtgtgtgtgtgtgtgtgtgtgtgtgtgtgtatgttcatgtacacttggctgtcaggctttctgtgcatgtactaaaaaaggagaaattataataaattagccgtcttgcggcccctaggcctaaacttctggtatcttagtgtctcagtatcttagtgtccttcactcggactgtaaacctaagaatgttcattaaccctccattcctgttagattcagtcaggtcttagcaatttttcctgctcgtctccacccccttctctgactcttgtcctttccacttctctattccccatttcctctttcgcctcagttccctccttgcccaaaccttctcagtgcccacataacttggtaaaccactcaaatcaagacctggggtaaagttgggagggaaagggctatagtggggtctgagggaatgttgacgggcagtttcacacagataaatctctgaaccagccgggcgcagtgcctcacgcctgtaatcccagcactttgggaggccgaggcggatggatcacctgagatcaggagttcaagaccagcctgatcaacatggagaaaccccatctctactaaaaatacaaaattagccgggcgtggtggtgcatgcctgtaatgccagctactcgggaggctgagagaatcgcttgaacctgggaggcggaggttgcggtgagccgagatggcgccattgcactccagcctgggcaacaaagcaagagtccgtctcaaaaaaaaaaaaaaaaaaaaaaatctgaaccaggtggagtggaaaatggcagatgtagacagcctttcctgagcgtgaaagtctcctcattctgtgggttaggagttggtcattgaagggctgacgcttaagagcccagatctcccaactcccttagttggcccttccgggagccgcccggtctcttgtgcaggaaggggaaggggccaaagcatgggggaaggcgtggcaggaagagggggactctgtggtcagggaactkctcgctgagcacagctgcacagtgctgtcagaacggccgatctccagcccaagatgattccagcagtggtcttgctcttactccttttggttgaacaagcaggtaagagggtttggtgagggatagcgtgagctggctccagggtggaagtccagagcttgggtctgagggccaagtcaaacacaggtgaaggaaggctgacagtgggtaggtgggcatagggagaccctgaggctagtcctctccagccccgacccagggcactagactcatagttccctcctttcttgttgccttcttacttcattccagacttttctccgtattattattattattttggagatggagtcttgctctgtcacccaggctggagtgcagtggcgcaatctctactcactgcaacctctgcctcctgggttcaagcgattctcctgcctcaggctcccgagtagctgggactacaggtgcccgccaccacgcccggctaagttaagtatttttggtagaaaccgggtttcgtcatgttgaccagggtagtcttgaactcctgactcaagtgatccacccacctcgacctcccaaagtgctgggattactggtgtgagccactgcacccagctattattattattaaaaaaagacagggtcttactatgttggccacatcggtcttgaactcctggcctcaagcaattctcccacctcggcctcccaaagtgctactgtgcctggctgacttttctcttttcagggttgatagaaagtggcaggggaagggtctggttgtatggcatgaagagctggtctggtgaaaagcctcatttctcatgatgagcatttcccatggggtgcctttggtcttgtctgctgggagctgatctctagctggtttaatatacaaagcacccttggtgcctataattccagctactcagaaggctgaggcaggagaatcacttgaacccaggaggtggaggttgcagtgagccaagatcgcaccactgcactctagcctgggggacagagtgagactccgtctcaaaaaaaaaaaaaagattttacatatatatctctatctatctatctatatacacacacacacacatacacacacacacacacacacacacacacacacacatatatatatatatakagagagagagagagagagagagataaccctttaggaaggtaggactctgttcttgtgcttgggagtaaggcaaggatatagccaagacaaacagacgggattgctgtttctatgggtcattgttaatgctccattctgtcagcagttgataatgagggtgggcagcatgagatccccagttccagagacctgagcgtcagctgagaaatagaggcagaaatgggaaggtctctgaagctctacagctccagccactatctaagaattctcactcctcgttcactctgtgttgtctgtgctggattggtgtgtgtgtgttggtggcagctgggtgttggggaggaggaggtcagtaaacttcagggaaactgtggaaattgaaagagaatgactggggaggaattccagcagcctagctgagaaggtgggagcaagtattaagttagccactggtctgctgccgtgggatgaggagggaggaggcccgctgaggcacaaaggaaagcatgggctttagaggcagaaaacctgcatttgagttccagctctgtcacttaactctgtggctctgagtgagttacttagcttttccgagccttggtttcgtcacccataaaatggcgatgatgatgtttccctcacagggtagttttaagatttgtgcaatatcgtgtgtgtgaaagagtgttgcagaataaaaagtacttgaccgatgtcagcaattgactgacgttagtcacatgttccctactggtcctctgatacggggtgagagcagtctctggagcccagacttgatttgattttttaaattgcacaaaacttcccctctcagagacccagagagtgagtaatagggcagagtaacaggagctggaatccatatagctgtggtcattcccccagccttgtgttcagggccaaaggtatctgtaaggtctgggaaaaacagacacactttttttttttttttttttttttacatatttaagtgtcttgtggtgggacagaaagcaacaaggctgaggctaggagatgaccaatgatagagtaattgccttctctcccttccccagctcacatccttcctgtccagccctcagccacaggtcacaggacttagtagagacacttctgtggtttcttcactgaaatttgccactacctctccctcccactacccatcttggctgaggttttggtttcagtccagtggactcagatgggtcccttgaggtggataaagtgctcaatggtgcctgaagaacccacagtgctaaaaagaaaaggttgggggctgagggggaaggcctcaattattagtccgtgtgagtcccatttcaatagaaccctcaagcttcctatcctagcctgaccctatggtgtgggaggagggaaaggtaagggcagtggaaggccagagagaaacagaatttcttcccttagayggctcccctccaggccctgtcctacctcccagagccccttcccttctctcctctgagtaccagatcctccctgatacccccgaccccatgggcatcctctatcccctcagcggccctgggagagcctcagctctgctatatcctggatgccatcctgtttctgtatggaattgtcctcaccctcctctactgtcgactgaaggtagcgctgggcagggtggggtaagggctggaaggggaagtgggaggagggcagcagcaaggattcgaagagaaggaataaaaggggatcctccacaaagtttggagggaagggggatgggccattaacttaccctttactgataacctttcccccattccagatccaagtgcgaaaggcagctataaccagctatgaggtatggaccctcctacacctggtgtggacaacttttcagaccctcagccctcctggggctctagcctgggtttccgggcctctgggagggcctgcctctcaggtgctgatctgcatacacctcagaggcctccctcccaccttacctagccaagccacaagtaaaatattcagcaggtgacasggaagaatcaagcatagagtgataaagaatatgtgagagacttggatgtagtatgtcgggtgtatatgtgtgcttgtagccatgtgggcaaacaggtatccatgtcccagagtgtccatgtgagtgccctctagcccaaggtggctggctgcccaccccccatgcctccctgggtggggcagatgctgaggggccctggagaaagtgtgggtctttaatgttttgcttcttttgtctctgcagaaatcagatggtgtttacacggtaagtgtgcctacctcccccacccaggaagtcagcagaagagggtgggattttgagcgatctttggaaggccggtggggggaggggggtcctgtggaggtgggaggggcctctgatggactccagctcctgatcgccctttgactcccatctccagggcctgagcaccaggaaccaggagacttacgagactctgaagcatgagaaaccaccacagtagctttagaatagatgcggtcatattcttctttggcttctggttcttccagccctcatggttggcatcacatatgcctgcatgccattaacaccagctggccctacccctataatgatcctgtgtcctaaattaatatayaccagtggttcctcctccctgktaaagactaatgctcagatgctgtttacggatatttatattcyagtctcactctcttgtcccacccttyttctyttccccattcccaactccagctaaaatatgggaagggagaacccccaataaaactgccatggactggactctattcattcattcattcatttatcatagatttattcagtctctgctaagcactagatacagcttttcagttccagaactcacagtctaatggacttcagagctattttgctcgactgagggataaatgctgactatggctgggggagggataaaaacctttgacctgtaggtgctctgaggatggagctggagcagggactagtgtgttgggagtctaggcatatttggaaacataagaaatgacttctgtatcagcatggccttctgtgttcgacaattgaaccaaggttgggttgtaggggagcctgggtgtccccagatggccaccaatccagacagcatcaatccagtacatgcatatgggaattagcatagctgaaaagccaaatatgcagaacggatggtgtaactagggctgagtgaagctcctaatggaaggttttatagcaacagtgaattttcagggcatctggggcaagtgggaccttagagggccagatgggtcagtggtaggtaaggcaaagggaaataagttgggtccaaatgggggggtcatctccttcaagtgcatgggtggtggtcaaggccctgtcaatgcctgtcctgttttcagagctacgaggaatatttgcctgaaagaatttaaacctcaggagatgctgccagtcctacttgtgacccagtcttttcagaatgggtctagagactccaagcttacccctggcataacccccaacctccacagtgctgcacaacacttcacactgcatagtgacttacacttttcaaagtattttccagctcattgtaccatttgatctgctaattaaccctgtgaggaaattcaggctctttgaagttaattaacctgtccaaggtcaccttgcaaggaaccgactgagatcactttcgtctctgcacattttgccacatgagaagaagcagatattgggaaagagaaggggtagtgagtaatcatgaatggcgagggtcttgaaggccagatgaagcaggttgatcaatatctggaaggaattggagccatctccggtgtctggcgggggaaaggtgatttcagatgagataagagaaatgagccagggtaggaaagtaacttttttttttttttttttttttgagatggagtctccctctatcaccaggctggagtgcagtggcatgatctgggctcactgcaacctctgcctcccgggttcaagagattctcgtgcttcagcctcccgagtagctaagactacaggcaccaccatgcccagctaattttttttgtatttttagtagagacagggtttcactatgttggtcttgatctcttgacctcgtgatctgctcgcctcagcctcctaaagtgctgggattacaggtgtgagccaccgagcctgacctggaagtaactcttttaaagataaagtgggaataaacttttattggaaaatgtttcattttcctttgctctgccttttgggattgtaagtctctccccatcaacccggactgatttccattccattttcatttaatccaggtatcacagctcccaaagtttttctagtcccacatgtccaccgaattggatacttgccaggcctttaaatggctaccacagctactacttccaggctccaagatggctaccaggccagttctatgaatagtgcctggatagcagtggaggagaggcttggaatgggtcttccacagacagtgtctagataagagggtttttgttgttgttgttgttgttgttgggatggagattcactcttggtgcccaggctggagtgcaatggcgtgatctcgactcactgcaacctccaccttccgggttcaagcgattctcctgcctcagtctcttgagtagctgggattataggcatgtgccaacactcccagctaatttttgtatttttagtagagacagggtttcaccatgttacccaggctggtctcgaactcctgacctcaggtgatctgcctgcctcggcctcccaaagtgctgggattacagaggtgagccactgcacccagctggtcttttgtttttaattaaaaaaatatatatattaggggggctcactgtgtttctcagtctggtctcgaactcctggcctcaagtgagtctcccacctcagccttccaaagtgctggggttacaggtgtgagccttgatgcctggtctagataagaggttttaaatggagaaattagagcacttctagggagaggagcaaactcaagtcttttattgtgggaaagggggaaacacagtgttcccctggctcagaagggaaaggagggccacgggtgacaccttgggaagctttcttttcttcatagaatgactaacaggaaattatgaggggtaccctcattttctttttttctttactttcttttttttttttttttttttttttttttgagacggagtcttgctctgtcacctaggctggagtgcagtggcacgatgtcagctcactgcaacctccgcctccccggttcaaaagattctcatgcctcagtctcccgagtagctgggattacaggcacgtgccacaacacctggctaatttttgtatttttagtagagacggggttttaccatgttggctaggctggtctggaactcctgatctcaagtgatccacctaccttggcctcccaaagtgcagggattacaggtgtgagccactgcaccccaccagggtaccctcattttctatgacctccagaaatcgagggattcagtttgtgaatccttccttcctctcctagttccttgtgcaatgcaaagcctctttagtgttcacctgcagagtcgtgcccaggctgtaggagactctgggtttggagaatcatggcaccctcatcctgtcattttcatcagttgtgtcttcaatcctttcttcacccctccacactcaaacctctctccttctagaagcagatttttccttttccttcctcttctcctcccttactcccctacttttcccagtcccccaaacataccaggctcagagctggattcattcagcatttattgtagcaaagagtgggtagggacaggagctctaggactggccagtgggtgttctagaggccagctggggttggaagacaatggtctggacacttcactgggtggcaggctgtgttccaagttccacgaaatagctcaagaagttaaccagttccgttccagccttcttgatcaggggtgtcagctgctcctttgacttttcaaagtaagacctggataggtgaggggattagagtttaatctgagggaccctaggcactggcaggggccttggtggtggtgggaggtcagagcagactgactcaggtccccaaactctagtgcctggtccatcgcatggcaaagcccctaggtaggaatagagtcaagacctttgctaggtagagggacagactctagagactgaaattcaaggcccagttcttgctgttcctctctatctaagagacgtgtgggatctttgggtgatgaaatactttttctctgcaatttaagcctaatctgccctaatccccacccctgggttcagacttctgtgggacctctcatcttcccttctttctctccacagttccacagcccctgaaccccttgccctgagacttacttggcctcggcctgaagctctgggctcttgaccttctccatcaggtccttgccatagtcagtcacggtctggaagtactgagaaaccaggctctccacacatggctcctttgcctgtctccgaaccaaagctcctgcccacacacacacacacacacacacacactcttttcagctgggtccacagcagtgaatcctggcctcctgccatacctctgccagtacccaccccagctctctgccccctccccaaaaaggtatccagccagatctttggatgggctttctgggctttagagagggaatgatcttccttttgagccctttggttgccagacctggatataagagcacaggcagataggtagctataaccaccagcacattctcccttttggccccctctccatatcacacccaccttcaaggctgcagatggtgaggagtagcacagttgctgcgagcagcttcatgttggtaacagtggggagggcggcctaggaagagggtggtgggggtttgggggacactgaagccaaatgggcttcagctcctccccagggatctccctacctgctgcccattccaacctggctctctccctctccacaactgaagcccaggcctctttggatgctgctcacacatcttgcctccttatcttacctagccagcgtctctgtccttggtgtctgtgcctgccctggctggagaggaaggggctatatacctgtctgtttacccaccccctgtcaggtgacagggactatggatgggcccagtggggcagggattatgtgaggataaacaagttggagaaatgggggaggagaggacaagcacatggaagactcatggtgatggggtgagaggcagggggtacagctcttagtggaggctaagggggtacacttcaggtatatttgaggttcattcttttgagatctgaggtccttggacttgaatgcaacaggaagcaggattccaagttatttctctggaaagctctgacatatcaacccatggaataccatcaacccatcataccatggaaagctcatggtgtctttattccattatgggtagatctcatctctcaaccttatcccactttactgcaacttggcagagagatattggggagcagaagaaaggagaaaggaattgaaatcagggacagggttgagggctatgggggttaggggaatgagggtcgggtaagagggcaagtgtaaatgatcttgtccgtttttgagttaatgtgtaatgagacggggagaaaacaggagagcccagaatgacctggatgctgatcactgaacataccctacccccagtaaaacaaattcagaaaacagcttccgcccgtcccctcccaatggagggctctggcaggaaaagaggtgaataagaggcttctaccagggtaaaggttgaaggcacctggtcatttgatcaccttatcagttctaggcagtgattagccaatattgagtcagcaggggcaatagccctggcccttgtctcactcctgttgggggtgggggagggggagaggtacattcccaggttcaaagcatttgggtgaaatcagttaaatagatatcagaagcttttgtatctttcacccttttgccccccaagcatactcgctgagtatgtggaacattcctgagggtgacagtggaggcgcaaagctgatgagggaggtagtgaccagagaccaagaaatctttgttttttaacttttgttttaaattcagaagtatatgtgcaggtttttttgtttgttttcctgagacggagttttgctcttgttgctcaggctggagcgtaatggcatgatctcggctcactgcaacctccacctcccgggttcaaggattctcctgcctcagcatcccaagtagctgggattacaggcatgcgccaccacgcccgggtaattttgtacttttagtagagacggggtttccccatgttggtcaggctggtcttgaactcccgacctcaggtgatctgcccgcctcggcctcccaaagtgctaggattacaggcatgagccaccgcccctggcctatatatgcaagtttgttacacacgtaaacttgtgtcatggggatttgttgtacagattatttcatcacccaggtattaagcctaatatccattagttatttttcctgatcttctccctcctcccacccttcaccctccaagaccaagaactcttactccattttcaattattcccctgtggagcgcttagtgcttgaggtcagccctttggcttgtccctggtcctgggatggagtgcctttgggggcca

SEQ ID NO: 97411 - DNA, 25716 bp, Homo sapiens
ttcctctctgtggagggcagatactccaccagctagagggaggacccgagccgaggggccaggctttcagactgggaggcgcctgagtgcgatccagcctgcccgtccccagctctcctgctcccaacccgatgtctcccagggctgccacagccactccaaagccagcagaacccagtaccaaccccaccaggtcctgttgccttgtcgcccagctctgggaccccatgcccaccctacagctcttgctctgcctgctacagggtcttcaaggtaggcaggaagccaggctgtgggcggccgctcctctgctgagcctcggccttgccgctgcaggcagacaagaagctgcagcttccctccacatcaccaagcaattccacaggggaaggggaggacaaggcccctatatcccatcctggtggctttgaccttgcattcttggccacttcagatgtgccccatttggggcagcggcagatggaaagggggcagggccctgctacacagatgtggtccgcgggccacagcgttgtgtcacctgggatcctgttagaagtgagtctcagctcccagacccactggatcagaatctgcatttacaagactggcagatgactcagatgcacttaaaagttcaagaagccctgatctagcacattctgcctcagtgtgcacagaggtcttcagctgtgcccagcaggatgtagccatgtatgtcttcaggggagcttgtcatctgcaggggctgcgctctgtgccctccaagcccaggaagctcaggggtcttgcccactgagaagtgctgctggaactgagaaagaacatttcattttccctggactgtttcaggtcaaattgcatagcctcaaattttatttttaaaagtcagccagagatcaaaccgtagcagcgggagggacttcttcaataaagtgtcttggaaaagcagttttcctgtgtacaccgaagactcttcaaagggggaccaggaccgctgcaaggagcgccacctatttctttaaatacccgaagattccattggctccaggccggcgaggttttgacagtttacacctggtgacatttagagactgattttggagagagctgaggggaggaggcatttggtataacttgacattacatcctctggctgactgcgctctctcttgccaatataccatttgtctatgaaacacttaggcccaaaaatagctgtacagtttggtgtcattgtggatgaaatgaagggcaactgccccatctctttggctttcagacaccctcaaaatgttgcgatgaaatgtcccagaggaattagcacagctcattaaacctgaattcccagccagggtggggccagtcagaacatggcgttgggacagatgggacatcagaagtgaccacctaatactccaggggtggcacctgcccaggggccacaagacttagagtgaaagggggtgccgttcataatcgcagcccgtcgacaggcatgaaccaggaccgtcctgggcagaaccccgtcttgggccaaatcccacctgttcagttggctctgcccccagaccaatgagatggggtccctggggtccaaggtgccgcctcctgagtgtacggtccagagcgtggtgacagggctccctcccaacaaagcaggcctattgctcccagtacggggcggggccttctcaaggccataggcagcacagcatctgcccacttctcgctggggcaatggccgtgtgcagctggctttccccacttctctccggggcggtgaccgtgtgcagctggctttccccacgtctctctggggcggtgaccgtgtgcagctggctttccccacttctctgcggggtggtgactgtgtgcagctttcctgggagtgcagcgaatgcagggtccctcttcctttccacttccgttcagctcccatgtttcattatcaagtgcattttccaccgaagtccagtagcaaacaggccctgggcttggaggtcacctgctgtgaaaggtggtgagaggatgtcacagggctcggcacttcactgactgcttctgacccgccatgcccttagtgtctcctctatggagctctgccacctgtggctcctgcggcccctcaaagcatcttggctgaacatacccagcccagtcaataggcccatcagcgaggtgggacatgagccccatgcctgggctacccggcagtcccaggaggccagcggggccgaggcgtggtactcagcatgcaccaggggtggggcagatcccacgggtggggggcagggccccaggccaggtcacaaggccacggcactggttctgcagtgaccctaacctgcctgtctctgtgtgtggtccacagcccgagaccgaggacgagaagaagcgctttgaggaaggcaaagggcggtacctgcagatgaaggcgaagcgacagggccacgcggagcctcagccctagactccctcctcctgccactggtgcctcgagtagccatggcaacgggcccagtgtccagtcacttagaagttccccccttggccaaaaacccaattcacattgagagctggtgttgtctgaagttttcgtatcacagtgttaacctgtactctctcctgcaaacctacacaccaaagctttatttatatcattccagtatcaatgctacacagtgttgtcccgagcgccgggaggcgttgggcagaaaccctcgggaatgcttccgagcacgctgtagggtatgggaagaacccagcaccactaataaagctgctgcttggctggacccacgtgtcctgggtggtcatttgtcttgggggggctgctttcccagggggtgtgggacattggggctcccgtggacagtctcagccctcccagcaccagcacctgcatgtaccctagaacctcaggcacagccacaccgattggtgtccggctggtgacttgctggctatgaatgcccatttcccgtgggtccctggtttggtgtcctggccccagacaccctggctccctggacctcataggcagcccagatgctgggaggatgtgggctcagggccacgctgcctggtgggagtgccagcaccccacaacccccctgtctggcttgcagaggatgccggctctgagcctgtgtggctttcctatgaacagggtggggctgctgggaaagactcagcgaggtgatggtgtgggaagagccaaatgtggcctggctcagcgtgtgggagccccaccctgacccagcctcttgctagaaactgcctagacaccccaaaatcctgtctgaaggagccccccagctggcgccaggactctgtgcctgacgtggaaactcccccagccactcaggcaggagtctgctgggatggcttatagggcaggggtctgagggacagcacgaatgtgtgtcagtgccgttggtgtgaagctgtgggcatacgtgtcactgacatatctgtgcatgtgcgtgtgcatctgtctgcatatctgtgagcacgtgtgtggtgagggtatcggtgtagcagggttgatctgtgcatctggcccagccaaggccactacagggaccaggaccccacctgcatccatggctgaaaaggaggccctccaatcaagcacacccagaagtggcatctgggagaatgttcccaattcagtctgtccctgaagccccaacatctgtcctgccgcctggagaagactggcccgtcaacagctgcggcctcgcacaaggctccctctggcccctggagagcgaggactcggctccagatgtgcagaaacaccagccaagagcttgggaatctgtcccgggccccagtcacggctgacggggttatttcctgtctgggagggggttggaggtgggagggacaagctcagccacatgaagcttctgccacgccaccatgccccttggccccccggggctggcctcagccagcctcggcccccagctccacccatgacccatgccagaatggtgccctgggttcagagcaatgaggaggccacccttcccagctagcagaaggcccagggctggccacagcagtgcctgagcccaggggctcactgaggggaccagttccccaaagcacccacacccttcacttgaagttgggccccgcatcagactccctagttcagtcctggctcagccactcatccgcgtggctttgggcaaaccaggcacctgaaaaccgcctcccaggggcaccgggcactttgcagcagaacccagcacagcacgaaataagccagggccccggggcggccatcagaggccatctcccacctgccctagagccagctgaggccgggcagaggcactggtccaggcagtgggtcagctgggctggcagaggggagccaggcccagacagaggcatggctctccatggctgtgtgtgcaatcttaaccgtggtgtttctaagcggcatggctctcggtggccatgtaattaagtgtggcgtttctaccgtttcaccccgagtcacaggcgagacacttagaaacaccacccttgattacagctgccctgtgccagcctcccactgctggtggcctatttataaccaggaccacctggagggggagccaacctgtccacagagggctcactggggacactgagggccctggctgcccgagaaaccacagggagtataggtgtgcatggccccagattcccccttgctcagccccacacgttattgcggggcctttctctacagacactcctctttttgtctcatgggacggaccctaagacccatcctgggccccctaaaagctgctcagggacctggggtgtggggacggtttaggcaggtgcaggctgtggagcagccctgcccggactgggcaagctccaagcatccgttttggctgcaattggtttgggtctcctcctggtcgggtgcctagtttcctccagacacaggggtgcctagtcatggatgtgtcccagaggcacggaaggacactatgccaggcagccccagaggccttgtgcccattgtgtgtgtggtcaggtgctttctagaaaagacaggcacgatcctcaggaggcgtcctctccagggcccccatcaagaagcaggaggctttccgcctgcatggggccagctgaggctgtcagtctgtgggtgacagcctgtgctctatgaggagtggtgatagcatgagggcttgggagggaggggcggaggggcgggaagaatgggaggaggggaggaggggagtaggagaaggcttcaggcgctgggctgcagaccctggcctctcccggctgggcggtggtgctcagagtttcagagagaacaatttctgagcctgtgggggtggcggggaccactcggcagcccggtggcccgtgcactttattccctcagtggaccccccaggcccggggagcagcgtgaatccgtaactggcccaaccttgcccctcgctgcccctgcttcagactggattcccggttcctagaagccgctggccatgcgtcccttgtcctctccacgccccgccccgattgttcatcttagatgcggcttcctccaggaaggtctccctgagccccagccctggccccaggttctcagtgtccattcctgccccagctccctctggcccccgggcccccagagctccgggcctgggtcttgccccggcgtccgaaggcggcgtccggagtgtgcaccgagccgagctgggagccaggggcgcggcgctgtcaggaggcgccaccagcccagggaggctcgggccggccgcgggcggacgcggggacacgggtgggctgcgtacggacggactgacggaaggacggacgggctgacagaccgacagacggccgcgcctctgagcgggcgggggcggggcgggccgaggggcggtgcggaggccccggcggagacatgcgccctgctccgccccccgcccccggccgcccggcgcagcagcggagcggcgggagctgagcgaagcgcggcggcggcggcggcgcctaggggagggaggggcggcggggccgagcccacctagcggagcgcgccggccgccggtggccgccgccagcatgccccggcccgcgggccgctccgccgccagccacccccgcggccctcggcggcctgcgctcggcccgggggcgcgggaaccgcagccggagccggaggcgggagcagcgagccggagccccgggcgctcgaatgcagggtgagcgtcgccgccctggcccgagggcggacggacgggaggaccccggcgggaggactcggcgggaagggagggggctttccgcgccctatcggtcgcggggtccgtccgagggcccacgagcggcgcttagcgctggcacccccccaacttggggaccttcggggtaacttccctggggccagcccctccctccgtccccctgcatcggggcctagcagcgccgccccctgggcttctcaggggacgggggcggggcgcggtctggggatcctgagcccgcccctgctcggcgcaacccrgaggggtccgggggccgcagtcccgccaggtttcccagcctgtcgctcggacgcgccctcggggtggggcaggactcggggcacccactggggaccagcaggcgagagcacgcgagtcggagcggggattgcagggcggggggggtgggatcggagccccagggggttgggactgtaggggcgggggctggggggggcgtgccggagatgtccaggcctcgcgctgcgcgtccctccctgggcgacggccaggccgggccccgtggaacagatcggctgcagcgcgggcggagaccggcgtgggggcggaagccggggcgcagccagagcccggggaatcctttcaagttctgggttctctttgttgcgcaatggggcctcggggccgcgcggcctcattggcccggagctgtgacgtcacgccccggccccgcccgcatgtcttgcggagggaggcctcatggcccgggtgggtcccaggctagttgcacctgcagttggccctgcagtgggcggggaagtgggaagcccggtcctgagatgctgcggaatgctttaagtgccctgcaggagaaacttcccagcagaagacagggctttaagtgccctgcaggagacacttcccagcaggagactgggtcccgtcggcactgtggggagcccagcctggggtctggccctagtggccgctccattctatgaagaatgaacagaaagggtgcaatccgtggatctgtggtcactgacccagagccagagggacactttgttcccacacaaccagtcctctgtcactctgcacttggaacccggtgtccacgccctgtcccccaggacgttcctctcccatgccaagactacagtgcccaggagtgcctggccccaaacccagccctgacactattctctccgtgttgccctgagcttctgcctgaagtgttcccatctgcagtgtggggacggtgagacctgccctgcagayctgaggctcagaaagacctcagctctagggacaaaaaaaaaaaaaatgcccttttccccaacattttagggtttgagaggccaggactttggtgtcaggcaagtggagtttggatcctggctcaggcaagtgctggccgggcaaacagctttacctctccctgcttctgctggacaaactttacaatggggatgaattgtgggggcactcactggaggagcatgcccgtgtgcaagaggatgcacgtgcccctgcccacagacctagagcctttttctttttaagacagggtctcactctgttgctcaggctagagtgcagtggcacaatcatggctcactgtatccttgacctccccaggctcaggtgatcctcacacctcagccttccaagtagctgggactataggctcacaccactacgcctggccaatttttttatttgttgtacagatgggttttccccatgttgcccaagctggtctcgaactcccgggctcaagccatccactcaccttggcctccccgagtgctaggattacaggcatgagccactgcaccctgccttcagacctaaagcctttcccagcagtaatgcagcattaggctagacgagaggaagaactggcaccgcgaagggctgggctggttgcagcctgtggctctttccttaccaccctgcaccagtaatcaacacatggacagggtgggcggggccaaggtcacggggctagacagagcttgttcacggggctagacagagcttgttgggcatctgagggaaggcctcccagtctcacagccgaggctgccttgggcaggtagaaatagatgctgacctgctaggtgcatgctgagtccactttcctatttgagagcgtaaagacyactggtgtctgcagccctcttgctcacagcgcttactcacactctgtctgctctgaacccccaaaaggctgccaggcaccccaaaggctggaggtggcccagtgctcccctcactcctgaggctastctgccccaggtcctggtcccagtgaatatgtatctgcccacaggtctgaggctccccggcacctccaagctcagtgtcttggcccataagagacagcacaaggctgggcgcggtggctcatgcctgtaatcccagcacttcrggaggccgaagcgggtggatcacctgaggtcaggagttcgagaccagcctggccaacatgatgaaacctcgtctctactaaaaatacaaaaaaatagctgggcgtggtggcgggcacctgtaatcccagctacttgggaggctgaggcaggagaattgtttgaacccaggaggcggaggttgcagtgagccgagatccaccctgggtaataagagtaaaactccatctcaaaaaaaaagaaagaactctggacaagacaagcaggaggcttgccagctgctggctggggcatcgctgccttccctgcccgagagccaggggccttggctaaggcggcagtggccccccaccttgagctggagatacttcctctctgggagacatggggcgtatctggtactatagatgcccataaggaccggggcatgagaaagagagcaaatgaggctaaatggcccctgggtragaagggccagttaagtgtgagcagagcacaagtaggccttcacttggtactgggcttctcccacactgcctgcctgggctgcagccagagggctgccaggctgggaagggtgagggaaggactcgctgcccagccctctggcaggatgggcgcttccccgctccccgccacatgcctgctgcccagcatcctatgtccctgactcacatggaaaggccatcggcacttcctctgacttcagagtcaagctctggtctggtctactggccgtctccaggcccttgctgcccaagccaaccagagcatgagactggccactaccccagagcacccagtgtgtgccagacctgggcccagggctatagagatgtggctcctgtccacctcagcctccccgcggaagaagcatggcagtctcttagaggagaaggtgcagggaccttgccccagccacaccgctgctgtgtgggggctttaacctcagcgcggggtcctggctctggaagaccagctgggggctgacatagcagactgcctgccccctctcagggtggtcaggaargtggtgaccatctccgttccccaacaggtcacttggggaacaggagagggaaatggaggttcagggggtgtggtcttccgggacatgtccttacgtggcctgatgaagtaaaataaattaaggcaagtacgtcagagatgtccactgtggggggctctggcatgggctgtgtgaggattctggaacatttgatggcaagaggacttgttctgggatggtgccaggtcatgcacggggcaagagtgcccatctgggcccaccttggatggttccctgaggatgcaggtaacctggaaggragcccagatattgagctttgaccaggagtggacggaagtgagggaatacgcacttattgggcaccccgtatacagcccctgggtgtcagggacatgggcaggagggwcctcccggggcgtggagaggagagtgcagcctgatgtaagccagggccagataggtcatggtgcgccagggccttccccgccttagggcatttgtgctgttgtaacacagtacttaagacgcagtaactsatgaagaacagatttatgtctcgccgggtgtgggagcacttgccctgtaatcccagctactcaggaggtttagatgggaggatcacttgagctcaggagttcgagaccagcccaggcaacatagtgagactctgtctctaaaatataaaaataaggccaggcacggcggctcatgcctgtaatcccagcactttgggaggctgaagtgggcaggtcacttgaggtcaggagtttaggaccagcctggccaacatggttaaaccctgttactactaaaaatacaaaaaaattagccgagcatggtggtgtatgcatgtagtcccagccactcggggctgaggcacaagaatggcttgaacccgggaggtggaggttgcaggagctgaggtggtgccactgcactccagcctgggcgacagagcaagactctgtctaaaaaaaaaaaaaaagaaaagaaagatttaaaaaatacacacatatataaattttttttttcaaaaaagaaaagctgagaaatccaaaatcaaggtgctggcaggtttggtgtctggcaaggcctggtctgtgcttcaaagatggtgccttgaatgctgcgtcctctggaggggaacagcactgttgctcacatggcagaagagggaaagctccttgagagagaactcactcctggaagcccttttgtaaagacattaaacccacccatggcctaatcacctcttaaatgtttcatggccaggcactatggctcacgcctgtaatcccaacactttgggagaccaaggcgggaagactgcttgaggccaggagtttgagaccaacctgggcaacactgcaagaccccttctctataataaaattaaaattagccaggcagggcagggcatggggctcacacctataatcccagcactttgggaggccgaggcgggtggatcacaaggtcaggagttcaagaccagcctgaccaacatggtgaaaccccatctctactaaaaacacaaaaaattagccaggcgtggtggtgcgtgcctgtaatcctagctactcaggaggctgaggccggagaattgcttgaacgcaggaggtgaaggttatagtgagccaagatcatgccattgcactccagcctgggtgacagagcaagattctatctcaaaaaaaaaaaaaaaaaaaaaaaaaaaaaacgtagccaggcatagtggtgcaggcctgtagtcccagctacttggaaggctgagtggggaggatcccttgagcccaggagttccatgccacagtgagctatgatctcaccactgcactccagcctgggtgatagatcaagaccccatttctaaaaaaatagtgttatcttrtaatcccagcactttgggaggccgaggcgggcagattacgaggtcaggagatcgagaccagcctggccaacatggtgaaaccccgtctctactaaaaatacaaaaattagccgggtgtggtggcaggcgcctgtagtcccagctactcaggaggctgaggtgggagaatggcatgaacccgggaagcggagcttgcagtgagctgagattgcgccactgcactccagcctgggctacggagcgagactctgtctccaaaaaaaaaaaaaatagtcttacctcttaatagtattagaatggcaattaaatctcaacacgttttaattaaatttcaacatgagttttgcaggggacattcaaagtgtagcgctcgccatctcccatcccaagtacctaagggctacaaygctgtcgccagagaggaagtcactgagtgcccactgccacccccccacagatgctcgtggtccccagcatccttgagccaccaggagtgagggctgctgctccctgagacctggctccaaggaggatgccacagccgcctgccagctccggtctgcaccatgagtgatgagcggcggctgcctggcagtgcagtgggctggctggtatgtgggggcctctccctgctggccaatgcctggggcatcctcagcgttggcgccaagcagaagaagtggaagcccttggagttcctgctgtgtacrctcgcggccacccacatgctaaatgtggccgtgcccatcgccacctactccgtggtgcagctgcggcggcagcrccccgacttcgagtggaatgagggtctctgcaaggtcttcgtgtccaccttctacaccctcaccctggccacctgtttctctgtcacctccctctcctaccaccgcatgtggatggtctgctggcctgtcaactaccggtgagcatgtgaagttctggggttcttggggttctaagcaggcgtgaaaacaaagacatatctggtgtgcccatgcgcacacaggagtggccacacctgtggcatgctgggagggcaggcaggctcaggaagggctgctgtaagctgctgggggcatacacgtagctttgcatgggtagacacaagcagccaatacagaatgcttggaagagggacgtgtgacaatgttcacagtatctcctatgcaaggaacaaggccccgccacactggctgtgccatgactatgatatactgggggtgtggggtgcctgggtggtgcggatcccctacaggtccccagaggcctggggaggccctgtgggtgacgccagatccctctgttccaccctgcctcatgccaggctgagcaatgccaagaagcaggcggtgcacacagtcatgggtatctggatggtgtccttcatcctgtcggccctgcctgccgttggctggcacgacaccagcgagcgcttctacacccatggctgccgcttcatcgtggctgagatcggcctgggctttggcgtctgcttcctgctgctggtgggcggcagcgtggccatgggcgtgatctgcacagccatcrccctcttccagacgctggccgtgcaggtggggcgccaggccgaccrccgcgccttcaccgtgcccaccatcgtggtggaggacgcgcagggcaagcggcgctcctccatcgatggctcggagcccgccaaaacctctctgcagaccacgggcctcgtgaccaccatagtcttcatctacgactgcctcatgggcttccctgtgctggtgggtgacggcgtcgggtagaggggcctgtctctgggacagccctggggctgctcatactccaggcatcaggtggttgagtcctcagacccaatcctttgagatgggcttgatcatcgtccccattttccagatttggaaaccgaggttcagagaggtgtaaagacctgcctagagtcagggcagcctggtgggacttgaacccacatccggcaactgcagggcccagggcctagctgctacagtgcagaagagtttgctccccttgcccaaggcccatttttttgtttttgttttactttatttatttatttatttttgagacagagttttgctcttgttgcccaggctggatgtgcaatggcacaatctcagctcactgcaacctctgcctcctgggttcaagcgagtctcctgcctcagcctccaagtagctgggattacaggtgcccgctgccacgcctggctaattttttttttgtatttttagtacagacaggttttcaccatgttagtcaggctggtctcgaactcctgacctcaggtgatctgcccatctcagcctcccaaactgctaggattacaagcgtgaaccactgcatctggcctcaagggccgtttgatgcagaggtaggatagcatacccatgggtttcctggtgggtccaggtcccaggatggacagagggagctttggtgccrtaggtaggtaggtaggggcgcaggatcaggagacagagcaaggccagggcrggcctcaaatgtctgttggggagttgcacttgatactaayggctggggaaggccaaggtgagggctgctgtgagaaaggccttgccgacaaaggtctgaggtccagaggggctgcctggggtcctcttggtgaagctgggaccagcttggcccaagaatgaagtctggactcagtagccaacccctgccccctgcaggactctacgcccatccccgaaaggtctgcagtgagacagggagaggactggggcaaagaccagcctgaggggtttcatccaagcagcaggcaagactgccttccctgagccattgcaggacatgaggacatgagctccagaatggtgactcggggggtggcagcttcagagtcagggccttgctcaggaggcagcccccactgccccacccccagcaggcctggttctccccagctaagggtcctcatgtgtacagtgggggctggcagcccggtccctgtgcagatggagggcaggggcttcatgaaacagcagagacccacaaggcacctcgggagcagagtgggggcmgtggtggggagaggcggggctgggagggagtcagaaccacccctgcrtctcttacggacggggaagagggtacagcttgtggggccactccatgctgctgttataaagcgtccggagtcttcaccctctagagcatggcctgttcttagcccattttccagatgaagaaactgagccccaaaggggtttagcagctttctgagggtcacgtggcccacaaacggcagaatcaacatacccacatcctccacactttcactcttttgtggcagtcacttaagcatcactctttgggacagagcaacgagggctatcctgggagaggaggaatgcagggacccaaaagcaggggtagggctgaggaggccactggccgggaagggggtggtagaatcttgaacaggcttgagacctggttctctaagcctcagtttcctcatctcaaaaaggggatggcagccrggcacagtgattcatacccgtaatcccagcactttgggaggccgaggcaggaggatctcttaagcccaggagatggaggctgcagtgagccatgattgagccactgcactccagcctgggtgacagaatgagactgtctcaaaacaaagcggggaggaggtggtaatccatgccccacttctctccatgggcagccaggaggaagacagagcaaggccacccagtgctgcccagtagccaggtagctcccggaaggcggggcctcccactgccacgctccagctcttttctccccaagggccccttctccttggcagatacccacctgtcagacctgccgtacacatggggagaccgagactcagggggagcttgtgtgatggtggggggtcctgcaggtgccaggccgagccctgtgcccacaggtggtgagcttcagcagcctgcgggccgacgcctcagcgccctggatggcactctgcgtgctgtggtgctccgtggcccaggccctgctgctgcctgtgttcctctgggcctgcgaccgctaccgggctgacctcaaagctgtccgggagaagtgcatggccctcatggccaacgacgaggagtcagacgatggtgaggatggcctgagagtggccccagggagagtggcgtctaggttaggtcattggggttggcaggaaaacggctgtcaggcaacgccactaaggaggtgacttcattctcaaccaccagacaccccgtgtcacccccaaatgtacttgaatgtccaagggacctaagccaggttcccacagggcactctcctatctggcttggctgccccaggttccaagtaatgggatgttctggttaacagagagcagggtagacatgtctgcaagtgctccagcggagctcctgggctcaccccccaacctcagggatccccagcaagctgccctgggggctcctgcagaccgaggtcctgtctggataccgttaccagcaatcccattaccctcagcccagcccgtgctctgtccaggcactgccagccccttgcgtgtgttatttagtcctcccgaggtcacctctggtcccaccccatgtcctagataaggaaattgtctcagtgagtgacctccctgcccagtctcacagctaaagggtggcatatttgggatttgaacccagaacccctcccattcccttttcagctaaccagccccctaccttgtatatgtctgttgggggatctcagggggatccctgggattccctcccagatgcccccaagtttccatgaccctaaggctctgcccccccacccaccccccaccctacagagaccagcctggaaggtggcatctccccggacctggtgttggagcgctccctggactatggctatggaggtgattttgtggccctagataggatggccaagtatgagatctccgccctggaggggggcctgccccagctctacccactgcggcccttgcaggaggacaagatgcaatacctgcaggtgagcgcagggctgggggagaggccgcacctgcgggtgacagggtgtcctgagctccccgaggcctctccactcggagcccatctcacgccttctgcagtcgcaggggtggctgtcaccatccgaggacgggctgtccaaaggtcacacagcttgtgtgggtgggccccaaccgccacccccatggtccctgtcacatgagttatctcctgccggctcagtatcctcaacgagcgccctccccaaccgaccccagctgtctgacacagccctgcggctcgaagagactgcaccaaacctcacagctcccagccagactgccccagcgcgcagcctggtccctgacccacggaaggcctttccccrgggtggagaagggtttgtccccgtttcccaggagggcagctcggggtaaaagccagccgcgtcctgacaggtcccgcccacgcggcgcttctcccacgacgatgcggacgtgtgggccgccgtcccgctgcccgccttcctgccgcgctggggctccggcgaggacctggccgccctggcgcacctggtgctgcctgccgggcccgagcggcgccgcgccagcctcctggccttcgcggaggacgcaccaccgtcccgcgcgcgccgccgctcggccgaragcctgctgtcgctgcggccctcggccctggatagcggcccgcggggagcccgcgactcgccccccggcagcccgcgccgccgccccgggcccggcccccgctccgcctcggcctcgctgctgcccgacgccttcgccctgaccgccttcgagtgcgagccacaggccctgcgccgcccgcccgggcccttccccgctgcgcccgccgcccccgacggcgcagatcccggagaggccccgacgcccccaagcagcgcccagcggagcccagggccacgcccctctgcgcactcgcacgccggctctctgcgccccggcctgagcgcgtcgtggggcgagcccggggggctgcgcgcggcgggcggcggcggcagcaccagcagcttcctgagttccccctccgagtcctcgggctacgccacgctgcactcggactcgctgggctccgcgtcctaggaccgccggcgcctccccacggacgccaggcaggccaggccgctctccggggccgcagcaccaaagacgcccgcctccscmccgcgcgcagacatgcgccacccctcccaggggtgagggggcgttggcctcagcgtttgtcttccggctcctcccagctggccttgtcccaggggcgacggctgccccggacgactgcgctgggcaccgcatgtcccgggccgagtgaggtcgggcctggggagctgagtgacatcccaagcttgggcttgggtagtgagtgacatgtgcacacgtccagctgcgccatcaccagccctgcgcaacaggacgtcgggagcagggaacctgagacagggccactgcgggatcggacaaagccccgctttggagaggctgagctggagccattggcctccccaggggctttccacccacactgcaccataaccgccacacccttcggggkgggggagggtacagagggtctctaagcacaggggtgttcagagcccgaacaagctttgatcaggtttccctgcttccgacctgtcctgcctcagtttccccatctgtgatgagcaggtgaccacgttaactctcagggctgtttgaagtctcttggttgtaggccctcgccactgagtggcccaggtgtgagaggtagtctagagccctctgcggcctttgtggaggtccgttytcagcatgtggcctggtgtggctccctaggcctgaggcctcccactctcagtgccccctgcccccttgggaacccacactccaccccagctaagcacaacactgtggaccaccaccaatggcacctgagccaccttgaccaccattagtgtccccaccctcattactctgccgtcgttgcctgtccccaccacatcatctccctccatggctcccaccatgacgctggcaggtgcaagcggagagcacgagggcagcagggcctggccttccgtgtccctgcgtcatccccagcctcactccccacccgtgcaggcctggccaggaagggatcctggcaggggcttccaggttstcagctcaaggcctggtcccgggcaggcgtccaacccctgggagcaatgtatttctttgccttccatcctgggcagaccccttacaggcctgggcattgccatgggccctgggtcttcccaggctaaggagaaccaggaacagctataaccytgagctagtgaaatagggtagatgagaaggctgtctcctccagacccctacccctacacagtggccccacaatatgaagacctggggtaattccaaggtgagcatagagcctgcctgtgcccagttccttctggccctcaggtggccaagcccatctcttcatccttcagatagggtcccactcccagaagaagctgctggggtgggggtgggaggctgcctaagcctgtctgtgcttcagaggcccctccagtccctggctgtggggtaactgggggtatgagctgtggccacaggtgagcaaggcagggaactgcaatccagccctggccgcgggaggggccatctctggccaatgctgctgtgccttcaaggactgacaagttacgtaggggcagaggtcgccagctagccagtgtctcctccatctggggggcgtctgtccacttgtcaccttaggttttcactcatttgtcaccttggggttttgctctgtgtgtttcatatccaacggcaatacttgcagggggacagagtcctctaaatactccaatcctgyggtttttacaaacataaagggggagaccccaagtggaggaccctgggcctggagctccctcccaaactttgtccagcatccagcctgttccctgggctcactggggagggagttgtcttcatagcacacccagagccagggatccctttgtagttttttgacaacggagcatttctcttctgtacaggacccaataaaaacttccttatgatttgcacctggcattccaaggctggtttcgtagaaaacccttctacaaccccacagcagggctggccagctgcccttaatgtcttcctctggaacctgagttcttctggtagtgtgacatttttggggggttggacttgctctctgtcttcagacaaatgctcaggtcccaccagcgagtgaggagtgagatggtcctggagtagcaacaggatgaagcagtggggtgggctccacagcccaccagtggaggaaaggccctattagcccaggtggcaacccctgccccagggttggcacctggggctgctagtcaccgtgagcttgactgaagagacagaacagggcagggcaataggagctgggcctaagctgcttgggacttgtcgagcccctgtccccccgcgcgcccgccctggagtttggaggaaggacctttgggtctgcagtgcaacaccgccacctggtggactgcagagggatttgtcctggcctctaccccaccccacaccgcgggaagcagaccggagaggccaccctggacggcgacagccgggactcccaccctcgccccagctccagcgagcccattaggtgcgacagtggagctgggtttttgaaggaccgtgggtccttctccacgcgtttggaccaggacgggtttagtgccctgcaggtcagggccgcccaaaaagagaagagcttctgtagaaagttggtatttgtggttacaaaagatgcacctaactaggcatcgcaggggtgggagacattagacctctggtgtcctcttgataccgacttcgcagattcgcgctggctttattctgaattacaaggtgtcgggagagggtgccaggatctctgaccccacaacccaagctgcccctcgctggcccggactcctgggccagaagcccaggggaagaaaatctgacttgagagcctcccaccaccgaagtccgtgcgcagcagtgacctcattatggaccaataaagtggcgcagcgcgctccgagagccgtccagggattggattctccggcagccctagggatctggagctgcggggtctacggggtccgggcttggaatgtgggccagggtctttgtcgagcggaaggcgttcccctctcccacgagaggcaccgggttcacttttgcagccttcaagctggtgccaccaagcaatgggtcccttccaggaaccgcgtgggcggggcgtccggttggggcggtgcatcttaggggcggggcttctgagaagggtgggcctcggggaatgcgccagcccggtgggcagcaccgcttgcgaaggaggtccttggaagtcaagaggatcccgggttgggggaggctgggggccccttgccggcggggcggggccaggcgcgctttgtgccggtgggaaccgggcgcccgcggtccgctgaatggtccggggcggggcagcgattctcctcgctgcgaggggtcagctctgcgctgttgccaactgcgacattcccaccgctgcgcggcaaccgggcgggggtgggggcgggcgggttgcccgccaggggtccctgggaaaggggcgcagcccaggacaccccctcccagcccctccggaggatgggcggagagcgagcggtccggcgtgtgtaggtggagctagagtgggggtggattatgcccagacgcgcagacccagtccggcagggctgggggtatttccctgcgcttgcggggtgcgcggccctctccaagccacccccgccccacgaccagaacggacgactggggggtcctggcagtcactgtgggcgtgctgaaaatagtccctgtgtcgcgagaccaaatagggagcgccttcagttcaggtcatccccggggcttccccagggccgccacacgcgcaggcccagcccgggactctcggcgcagcgactcgacgctggctgcggcggggggacgctggcggacgagccagggagactttcggggaggaggagcaggggtggtggggaccgcgggccgccggcggccggagcaggagcccagacggcaggggtgcaagggcggaacagcgcgggcgcctcctggcccaacccggcgctgtccatggtgctgccggctgcgctctcggtcaccagggggcagcgcaggccgctgccgacctcatctccgcgccgaaggagctggctcacgccgggcaggcagctgcggaagcccgacggttgctcggctcccctgggcacaggccagagccctgtggggaagagcggacgcgagaaacagggaggggaagagagggaaggggaaggggagggggagggagaggaggggaagggggagggaggggaggggaggaagggagggaggagaggggagtggaggtggaggggaaaggagggaggaagcgtgttgaggaagggaagaggagggcggaggtcagacgacccgaacgtctcccccggggtccagacctaccacccagattgcaatcgcacagccagcccgggctttactgctcctccctcgccccctagcgagctggggccccctcctcaccaactgcacctgcctccgagttgtcctctttatatttgctgtcttgccatgttgcccaggctggtctcaaaagcccggggtcaagcggtccttgaggtatccctctttatttggccttgtgcatccctggctctgatcccacaagcctccccctcctccctccagccctcccctataccttgcaaggagttctgaaggcttctcatgtacttcacgctcaactccaggatgtcggccttctccaatttgcgcttccggatctacccgaccatggaaaggtctattagaccggcctcccgaggtggagagagggaggttgggatcgtatcacccacccacccccaccccgcctgagtctcacctggtgcgagtagtgtttctccagcagcgacttgagctgctccagtgacacattgatgcgtgcccggcgctttttctccatcagcggcttggaaatctgcagatgaacagcctttagagtgcaggactgccaccctcctgccctcggcacccccccacacctcccggggaagggtgcctgcccctagtccctcaagaccccagacctttcggaagttgccggggaggctgccccgggcagcaggctccgtgcccatgttgcagtccatgcaccagtgcgaggcagcgccgcctttatagggaccctcgtttacatgtcaatgaggccctctggactctagaaaccttgaggaggaggggaccgagggaggacgcactgggaagctccccacctccttccctcagccccctcccatagcctaggcttcctctcaccttcaggaccccccctgtctcccgagggacccccccctcccctttatctgtcttttccttatctctctggcctccaccacttccccagtctgaggacccctgccatgcccaccccctccatgcccatcctgtcccaatccccgtaagttctccagtcccacttgccaagtccttgataccctggagtgcaagcattccaggggtcacctactggggaggtacatgggccagctggccacaggctgcctcactgactatgacagggctctgggctccctcgggactgatgaagatgccaaggcgacgcctctttatgcacttcatgctctggttatacccgcaacgccgcattagttgccctaatgtcgggacaatgcagcaattttctgcctgtggctgctcaaagccaggcacaagctgagcccgcgggggccatgcagcagcctgtgtcccattaaagcatgcagcccacccgcggggccacagccagcctcatccttgctggggccttgggattgggaggggtcctggtgagggtgcagcctgggtcctgtgttctctgacactgctaggatccaacgcggacttcccacaggaggcaggtggggtgaacacggctgcctctcccttccttacagccctgggcttccaggctgggtggctttggtggtagaccctgtccccatggagaagcactagaagtctactcccatgagcctgctctcagctccacgcacaggtggtggtggcaggagaccactgacattctgggaagagctccaggccacacttcgagagatccagggcccgcaccccaatctatgattcagactacggcggacccagtggaggaggcgcctggagcacttgccccaggatgggctaggcctacagcaaggctctggggccatccccctggttggactccaggaggctgaactgtagctgctgtgatggacaggaaggctgacctccaggaagtccctgggttcaaacctagacacctcccatgggccctcatggctttagtttttggggcttgtaaaattatattctgaacaatgcagcccccattgcttctgagggtgacagggaagtcgcaaaaattctgcagctgagccctgtggcagaggaatgaacaaaccggcttctgtgtagggactcagggtggggtgcgccccccagctctatcaagccagggcatctccccccagcccgcccccgcctacccttcccaggatagcggcgttcccaggcgccaagcagcgtggagaatcgcgccacgccctccccctttcaggccgaggcagcggcaacagcagctctggggctctgtccagcccggaccgcagggcccgcgggccagatccgggccgacccgggcctgggagggcggcgggggccgagaccaggcggcgggcgctggcacgcgccgggcagctttgaagcgccaggaccggccgggccggggcgtcctccatgcgactcgctccgagcttggggcggtggcggcgcggtataaaggcaccgcggggcgggcgggcggcgcggccgggcacaaaaggggcagccgagtgttaagggcattgtgcgggccccacaaagcggcgcccgcgcccgcccccgccccctcggggccaaactccgggcgccccgccaggcgcggacttccagctgctgcacatctgcacagaggcctggcgcgcgtcgcgccccggcgggcctccccctccccgcgttctcgagctgcggggcagcggggcaatttgtcctctaattacaatccttccctataaaccgccgcccgcgcctttcaactcgagggcattagcaaaccaatggccctccgcgcagctctcgcggcccgccgctgggtgccgggcccgccccctctcctgagtccgggccgccataaaggggccacgaggctgcccccgcccgaaccccgacacccgccgttcccagggccaccacccctcccaagcccgtcccctgggattccaggcgcatcgggccgggggcggggggacgctcacgtggatagcttagtgtttcttaagcagtggaaaattgaccgcaaaatgctctaattcgcaatgttctgctttggctgcgggaggcgaggcccgcctcaaggcctgggcggaattctcaggcgtcgctccgccctggtccactgaatggacttccgcctccgttgccccccgaccccaaccccgacactgcccgccgcgccccctgtcctgtggcccgttttcggtcagtggtctccccacctggaatgatccccctactttctgacgcccccacccgtggctcctccatcacaaacagcctccttggcccgctactcgccttacactggccgagggtcgcgcaggatcaaggtggggagagatcttggtgcgatttccaccctcccctttcccgagctctgagccgagtttctccccaccatcgccactttaccctcacttcttgctcctatctctgggcagccacttcccctactaagttaaagtcattgtgctttgcatctgacaaggtcattgggaaagacagcagactagtctctacagggacccttcccggaaacccaggctgaagactcggggtccaccctccaccccagcctgtcacgctgattacaagc

SEQ ID NO: 97412 - DNA, 24543 bp, Homo sapiens
tgaggcctgcgcaccgccgggaaagacgcggtgtccgagaccagcctagctgaggcctgcgcaccgccgggaaagacgcggggtccgagaccagcctagctgaggcctgcgcaccgccgggaaagacgcggggtccgagtccagcctagctgaggcctgcacagcgccgggaaagacgcagagtcagtccagcctagctggggcctgcgcaccgccgggaaagacgcagagtccgagaccagcctagctgaggcctgcgcaccgccggggaagacgcagagtccgagaccaccctagctgaggcctgcgcaccgccgggaaagacgcggtgtccgagaccagcctagctgaggcctgcgcaccgccgggaaagacgcggggtccgagaccagcctagctgaggcctgcgcaccgccgggaaagacgcggggtccgagaccagcctagctggggcctgcgcaccgccgggaaagacgcagggtccgagtccagcctagctgaggcctgcgcaccgccgggaaagacgcagagtcagtccagcctagctggggcctgcgcaccgccgggaaagacgcggggtccgagaccagcctagctgaggcctgcgcaccgccgggaaagacgcagagtccgagaccagcctagctgagtcctgcatacctaactccgccgaggacttacattctgatttcaggggttctcttagcctgtcaccaagtgtttaaagaaggttatgatgaaaccaacaagccaatccgagtgtctttaaactggggccacgaatgaaattcactcctgtaagagggcaggggagctggggcactctctcatcccaaaatggaaaaacattcatttttaacagtaataaaacatgaggtggtgaaggcacagcggcgtcggacgtgactcgcagcgcatccaagacaaggggcctgttcttggtggctcagaagacgagggcagcagcaagaccctcgggggaacccttagggaagtcaccgggttgtccttttaaacgatgtgtgccaccgcacagaaactgcaaaggagaaaactaaaattatttgtaacccaccgatctgaggaaacggctgctggcattggctgtttctctccatggttgagatcgcagtattgggacacttttacagctgcctttgtcatttaacactattccaccggaattttcttatgttcttaagaaactcctaagaagtataattttagtacctgcaaggtatctgtcacagagtcaccattactcgaccaggcctctgtttcacacagtcgggtcgtttttagtcagtgatccaagggggccgggcggtgaaccaagtctaacggaggcagtcacagttcagtgacagagttccttcctggttctgatggggaagttcagtcaccgtgtctgtatgttacttactcgcttctttcagggtcttttccaataaagacagctatttttcatggcaatggaaattataaaagcagctaccctcatgcagatcgtcctgggggcatcccagctgcaccctggtgccgggacagccttactgcaagaaaaacagggtgtgggaggatttacgagttccagctgagccagctacatcaacctgtgggcacgtggcgggttggtggccaagcctgaactgagaccaaggctttggactcctagcactggctgtctcgcttgctaaaccgtaatagtctcatctaactgctctgtactaagaacatgcttccggatccaaccgatgtgtttcggaggtgccctacccattcaggggcagggtggggctgtcacccagtcgagaggctttcctgaagccgagagcactgggaggcagcatctgagacctctctccacagcaggagctcccccacatctccagggaagaacacgttccagcagatccacagccggcacaaaggaaaccttaggaaggtggtgctaggctctccacgctggtccttagcagctgttcctcctgcagctcagagctcagcatcccttctccaggaccttcccgccatcaggcactctctgcaccacccagctccaccaccatctctgcctccttcccacggaccgtcagcccaatgctgggtccccactgcagcttccacaaacccttagacccgctggtgatgtgctagctccctcattcccggcctgggagagcctggcctggtcccacctccctcctgccaccctccgctcaagcacatggccatcccaacagcagagccctgtctgagaggaaagaactcagctccagaccgccagcaggcaaacatatggaaagatgggctcaactcagtttctggtttttcactaattcatggcttttttattaaatgcaatctgaatacagatggatgcaggagtgggtttccataacaggccatggatggtgagctaatggcctgaaatgtcaagtccaaatctccaaacaaaagtgatcatttaaaaggaagatgtgtgtagccgtactcgtgggacataaactgttctttttcttttcttttcttttttcttttgagatggagtctcgctctgtcgcccaggctggagtgcaatggtacaatcttggctcactgcaacctctgcctcctgggtttaagcaattctccttcctcagcctcctgagtagctgggattacaggtgcacgctaccacgcccagctaatttttgtatttttagtagagatggggtttcactatgttggccaggctggtctcaaactcctgaccttgtgatccacctgcctcggcctcccaaagtgctgagattacaggtatgagccaccacgcccagctgggacatgaagttttcttaaacaacaatgctttgtaaggatcccaagcagcagaagaatccaactgaattgaaagtgggctaaagagtgcacaaactcagcatgggatgaggtgagggagagcagcctgctggcgctcacaggctgaggggcctgtagacccggaagtcggtaccacttgtgggaagtctctggtgaagatgaaaaccgccccaggcacattcacagaaatgctctggggtttgtggaccctgggcatgttcccagaagcgctctgtggtttgcggggcctcgcacggctcagcgcggcaccccctccctgtggattcccgctctgagagtcaagatcactgcatgggagtgcattgcttcttgtcctaattgacagggaacatttggtggtgtctccaccacaagagacgcagcatggctgcgggaccagtgaagccataaagcccactcggtgccttgtggggccgacaccgtgtcactgcaggaagccgcagcccggcctggatttccaggaagcaaggccagctcagcacagacacaactcccatgacagcttgaacccagctcacccccgctatgagagaaacaccgggtgactgacctggagtgaaaacagcagtgaggaagggggaagagccccccacactctcagaatggtctctggacggagacccccaggcagtggccatctgaccctggctgtgtctgaccgtggaaccaaagcagacatgtttgagcagaaccagagcagacatgtttgactccagtcagcccttgagggagctggctaacgaggaccacccaagaccccagaacatgacaaatgcaaagagcttggactgaggaaagcaagttcaaattcttcactgtgtgattccaagcaaatcagaaccaaattcttatctgaatgttttcagtgacagatcaaagaaaagatcccagccagcgtgagccccaggcacacactgcctcacagcgggctcacactgggcacacactggcttacactgggtatacactgggctcacactggctcacactgggctcactccgggctcaacactggctcaaactgggcacacaccaggcttacactgggcacatactggccacacacttgctcacactggcttgcactgggcttagaccaggcacacaccaggcacactggctcacctcgagcacacaatggctcacactgggcacactggctcacaccaggcacacactgcctcacacgacacacactgggcacatactgggcacacactggcttgcactgggctcacaccagacacacagcaggcacactggctcacatcgagcacacactggctcacactgggcacatactggccacatactggctcacactggctcacactggccacacactggctcgcactgggcacacaccaggacacactggctcacatcgagcacacactggctcacactgggcacatactggccacacactggctcacactgggcacatactggctcacactggctcacactggccacacactggctcacaatggctcacactgggcacacaccaggacacactggctcacaccgggcacacactgggcacacactggcttacagccacccacccgagggacaggctggtgccaggggaagctgtgtctgagtgctccatcatgttatccgggacctgctcgtccctctctctgacctgcctgctggacaccaacaccagccctcaagtgccagcagtgacaagcccacctgagcagaaatgcagattctcgtccagcatcctcagagtccaatccactctaacaggatcccctttggtcacatgacccctcctgagccaatcactgcagccaggaccacggaacattctggctgactcacgggatgccttgtccagggcggggaggactcagagttctcgctggacctttaatgacgtgtgagggagaagagaaacacgacacggtcagggagacgtcacaggttttccccagatcctcaggggaaccacacacagtgactcatgaggagcggcggggccttgagccagggcgaaagcaccgggcgctccaggatcccaggctccttccctgaacaagcatccaaacctctcaagctagggctgactacaaacgacaaagtcctgtaacacagagctcagatagcggatttcaaacgttttgttcatgaaaatgtaacctctgtgtcgtcttggaacagtgttcaggagggggagggtgcaagctctggcccaggccccacctctaccagggaaggcaaacatcacttaaacgcctgcagcctcctgcgaaggttttctgagactatcagtaaagataatatgttttcaagctcctggaatatgtttaaagtattatgcaaacaaacaacagctattagaaatatcactttacaaactttttgttgagatactatgcattccaaagcgttcaccagtgagaagtacacagcttggtgctgcctgaagacgcagcctggcccgggatttccaggagcaaggccagctcagaacagatgcaacccccataaaacagagcttaagacaacctcaccctcactagaatggcttacactcctgctacaaaagaaacacctggtgactgacctggagtgaaaacaggaacgaggaagggggaagaggccccgcgccctgacaaatgtttacagaacaaacactcccacccagacatagattcataacccacaagccccgcccccatcctctcagtcaccatcattctaaattccaggctgaacgtcagctttgcctgtttgaactgtaggtccgtggaatcacactctctgctctcctgaatccggcttctttgcgcaatatcccatttgtgagagtcacctgtgtggctctgtacaacagtagctggtggttttttattgctctgtagtatttaattgcatggaacatcccacagttatttctacattcccctgtgcatagacgtgtaagttatttcagttgtaagctgttataaatcaagctgctgggaacattcttaggcctttttgtatatttaaggatgcatttctattgggtatgtactcataggagtgggattactagaccataaaagacagatatattcagcttccacagatacgaaccaagctgctaggcacattcttgtacatgtcctttgcatacctcagtctgcatttctgttgggaatacatgtatctaggagtgctattatttgatcacagggtaaaaaaaatacatagctacatttgtcactttattctgaagtttacaggcaaaagctgctgatgatacggattgatagcgatgtccacttttcattcctggcactggtaagttggtccttccttctgtttttcttgatcagccttgccagaagtgtatattcacatcttttaaagaagcaatgattggttttgttcattctctctaccgtacatttgttttctattacattatttttctttttattatattcttatatttctttaacttcaattttctgttctttttctacactctttagacatatgtcattttcaccttttcttcttttctaataaaagcatctaaggttataatttatttctaaccatagctttaacttgatcccaaaattcccaaaattgtttaatattgtatttttattatagttcagttcacaatattttcagatttctattgacatttcttctttgacaaatggggtatttagaagagtactgcttaatttccaaacatttagattttctagggatttttttttccatttgtttttagcttaatttctttggccaaagaaatactccgaatgatttcaatctttagcaatatgttaagatttgtttatctgatcraaacatttccgtctaatagatggtcattttcaatatgtatgctgtgtgcactggaaaagaacacaggttctattttgatagttgcagtgtgtccattagatcaaggccattaatcccgttcttcagacctgcttcagcatgtctctctaaatacatgacaggacacacacaccaataataaaaacaaacatgcataaaaatgtgcattattctctccggtaattatctcaatatttgctttatacatttgaaaattatatcaggtgcatcaaatttataattactgtgtgttcctgatagaccaacccttatatttattatggccctttttatctcrgaaaatgcttcctgccttaacatctactttgtatattagtttagatataccagctttctttagggtagtgttttcattgtattctcttccagcgtttcaaacttttatatctcaacattgaaggtggtcccttgcaagcagtgtggttttgttttttagtgacaatctttaatttttgagtggartatttatctcatttatttacaatgaaattactaatatattgggatttatatcgactrtcttaccttgtttttttatttgtctcatctgttttattttyccttttatcctttattgctttcttctggatggagtatttttattattattttgattccctttcttagcttgttagctattctttttgtggctattctagaaataataacacgggtccttgatttatcatggtgcaacacacatcacatcccacatggtgtcagaaaaactggatacacacatgcacataacaaaattggaccgttaccttataccatacacacacacaaatcaactaaaaatggattcatgccttaaacataacacctgaacctgtaaaccgcctagaaggaaatataggaaaaaaccttcatgacattggtcttagcaattattttttggatatgacaccaaaagctcaggcaacaaaagcagaaacagacaagggagactacatcaaactaaagtttctgcaaaagaaacaatcaacagtgaaaaggcaatctacagaacaggataaaatacttgcaaatcgtataactttttaaaaggttaatgtccaaaatgtataaggaactgctgcaacccaataaccaaaaacaaaataacctgattttttaaacgggcaaaaggacctaaatagacatttctcacaagaagaaatacaaatggactgcaggtatacaacaaaaatgctcgacatcactaatcgccagcaaaatctaaatcagcactacaatgagctrtcatatcaaacttgttaggatacctattatcagaaaaaaaaaagatgagtattggtgaagactgtatactgttgtgggaatgcaaaaggtccttatggaaaacagtatacaggttcctcaaaaaattaaaaatagaactactatttgatccagcaaccccactctgggtttttacccaaaagagtcaaaatcaagatctccaaagagatacttgcattcccacactaactgtggcattatttgcaatatccaagatgtggccacaacccaaatgtccatcaacagatggatggatgttttacatgtggtatatctagacaatgaaacattactcagccttaaaaaagaagaaaatcctgctgtaagtgacagcatagatgaacctggaagacatgagctgagcgaagtaatccaggcacagaaaagataacactgatgatttcacttagacgaggcatctaaaatagtccaatgcgtagacccagagagaagaatggtggtttccaggggctgggtcggggcagggtgaggtattgctaatcaatgggtatcaagttttagttctgcaggatgaacgagtgctagagatctgcggtacagatcatggctgtcatcaacaatactgtgccatgcacttaaaatgttaagagggtggatctcatgttatatgttctttccacaaaaaagaacatggatccctgacttattagtgtaacacgcattatcrcatcctggataatgccaaaacctgagaacactaactcctttaccttctgtgccaccaatattcgtgttgatttaccaacccattgatagttcccactgctrtccctgcctgccttgtttcctggtttccatgtgggtttactttcctcctgccagaagcccctgcagtcttttcccaagagtcatctgttgatggagtctctcgagttctgtctgtcttttcgtaggagtcatctgttgatggagtctctcgagttctgtctgtcttttcctaagagtcatctgttgatggagtctctcgagttctgtctgtcttttcctaagagtcatctgttgatggagtctctcgagttctgtctgtcttttcctaagagtcatctgttgatggagtctctcragttctgtctgtcttttcctaagagtcatctgttgatggagtctctcgagttctgtctgtcttttcctaagagtcatctgttgatggagtctctcaagttctgtctgtctggtcacgtcttgatttcatctttatacctgagaaacatttccagggagtagagaacttgaattgatggggtgttttcttccatcacatgcgaggttcatcacacttctggtctccatggtttctggtgaaacaattcatcaatagagattaatttcctatgatttttctctgcttgctttccagattttctcttaaactttggtttttactaattttagagtgatgttcagaggtagggttttctttgtgttcattctgtgaggttgaactaaccacacaaaactgccaatattcaactgttgtttacctttaaaatagctatataatagattttttaaaatccaagctttggtgtctttcttcaggtttgaaaaaaatcatagctctcatcgcctcaaacattgcttctaagctgttttccttctcctcttctgggactccacctacacatatagacctttccaacagatctcctctgcctcatacactccrtcctgtactttctctcagttttgatctgttactctgcctcattatttcccagggaccttcttccagctcactcatctgctcttccttcatactcaatgttttgtgatgcccatctattgagttattagattcagctctagaatttccatttgattactttgtttatagaatcaatttttctggtgaaattttccacttaccctttattttcttgaacatatcaaccacagttattttaaaatttgactgcaacaagtataataactatctgtgggtgtactgttgtcatctgtttttgtgtcttggtcttgcttcttgacaactgaaattcagacattacatatgaaactgcagagactctgggtgagtctatcttcttaccttcctcctcactagacagccagatcgagggtagatccccttaactcaagggaggcctgagacaagaagacagacccatcattcttggaaggctcagtcacctggggtttatcctcacacctatggcatgacccatccggggctgggacctgggatgtgtgcgatggcccctctttcttagaagttcctgaattccagtttcatctcttcagcattatgagactgccagaaatcctgctctgcttttccatagctttctgatcagcctctgattcaactcaagaatttggcaaatgtgtcagaggtgaaagccacaggtgctgattgcctctgtacctactttctctttgggatccagtctcctcagggcctggtaacctttgcaatgcaaacatctatttgtgtgttgatgaccctatgaggttgccaagtgctctgtgggtttcactgcctcttctccacagcccttgcctggtttctcagcctctttcgacaggaatcacaaatgcccccaggagacaggcagcccgcagggagtgggctccctaacagtgcccctccgatgggtcttttttaagtttttttggccaggggctgtggctcacacctgtcatcccagcactttgggaggctgaggtgggcggatcacctgaggtcaggaatttgagaccagcctggccaacatggtgaaaccccgtctctactaaaaatacaaaaattagccaggcgtggtggtgcatgcctgtaatcccagctactgggaggctgaggcaggagaattgcttgaacctgggaggcagaagttgcagtgccactgcactccaacctgggcaacagagtgggactccatctcaaaaaaaaaaaagaaaaagttttattttatttttaattgacaaataattgtacatatttatgggctacggtgtgatgtttcaacacatatatacattgtggaatcatcaaaacaggctaattaacaggatcttggcctctcaaatcccggttgcctccgcagctccccaaagcaggcattctgtggattttacccagcacttctagttgttccccacaggaaatctgatccgatgcaaacagatcattatagccaagagaaggtcagttctgatcgttgttgattttcctggaatttgctaatgatgaatcgtgctgtgtgaaaatacactttaggctgatgcccagctgattagcatatagggtttagtgacatttccactgatagtgacttcctcaaagacactctgaccaggggtcagcaaaccagagccccgggacctaccccacctgtcttttcatgtagggcctgggaaaggaaaacaaaccttgggactccaaaatctccaggctaaagggaaaagtcaagctgggaactgctcagggcaaacctgcctcccattctgttcaaagtcacccctctgaggctgccctgagacaaatgcatctcattgctccctctcccctattgcttatgtaaaaatgcagattcactgagccaggctcaattgtgtattcactggaaggctggtcaaggactcaaaagaatgcaaacttttgtctcttatctatttctaacctggaagccgccatttccagtcatcccgccttactggactgaaccaaagtatgtcttacacatattgattgacgtctcatgtctccctaaaatgtataaaagcaaactgtgcccccgaccacctcgggcacatgcctcaggcccccgtccacctcctgcrcatgcctcagcccccgaccacctcaggcacaagtctcaggacttcctgaggctgtatcatggatgcatccttcaccttgccaaaatactttctaaattgactgagacctttctcagatattttgtgctcacaagcctttgagctaagaatggtttttatatttttttaagggttgtaggaaaaatgagatggagacagggacagagaagaagtggggaagagagaagaaaggaggagaaggaagagaagaagaagaggagaaggagtaagatgaggaggaggaaacagtaatctttgtggctttcaaagccaagatatttatcatttggtcctttacagataaagcttgccaactcaagttcatgaccatctctaattcttttaaatatcaagtcatgatgtgtattaatataaagattgcatattaaatgcatcttccatagacatagaaagtaaagatatraaaatcagtttgtactgattgtaagacaagtctctgaacgaccaacaagatggcccagtctgtggagctccaggcttatttacggggtgcacctcgtagtgcccacaaggaagctagatcttttggaaataattctgcaatgtggaaataattttgcaacgtggaaatactgaggcctggggctgactgatttattgatgagaaacccagggaggcattggtttggggttctgtgacatcatgttgaggcatctgcatttcctatcacactgtactaaatcagttagaaaatatcttaatttccctatcctcacatgagtcttactgggtcctgacaacctcctggcctctcaccctaatgagtcctcatttctgagtggacatttctcccaaattcagttgcaacaacagatggtgtgtggccacagcccataaaggtagagactcatgctcaaagctgccttctggtaggcaaagtcgccacctcgaacacaccctccaaagacttgacattcagataccaaatgctccaggtccagctcccaaaagctagatggattgtccgttccattcgggcttcaaatcagaggctgtggtggctgtggtatctcaggactggtgcagtagggttctagcacagcttcaggcagacttcctcaacaacagtgatggtgatggtagtggtggtggtgatagtgaaagcagtggtggtggtgatgatggtggtaatggtagtagctatgggtgtggtggtgatgatggtggtgatggtagtgatggtaataggggtgatagtggtgatgtggtaatgatggtggtggtggcagtggcggcggtggtggtgataatgatagtggtaacaatggtggtggtgatggtggtaatactggtgatggaggtggtcgtggtgatgatggtggcagtagtgatggtggtagtgatagtgacagggtggtggtggtggtgatggtgataggggtggatagtagtggtgaaggtggtggtgatgatgacagtggtggtgacagtggtggtggtgatgttagtgatagtggtgatggtgatgggggtggtagtggtgatggtggtagtagtagtggtggtggtgatggcagtgacgggggtggtggtgggggcagtggtattggtggtggtggtgaaggtggtggtggtgacggtgatgatgatggtagtgatagtggtgatggtggtggtgatgatggtgatggggtagtagtggtgttggtggtagtggtggtggtgatggcagtgatgggggtggtggtagtcgtggtggtggtgacagtggtagtagtgatggtggtagtgatgggggtggtagtgatggtggtgctggtggtagtgataggggtggtagtgatggtgatggtgatagtggtgatggcagtggtagtgatggtggtgatagtgatggtgatagcagtggtggcagtggtggtgatagtgatggtgatggtggtggtggtgatggtgatagtaatggtgatggcaatgaaggtgatggtgatggtgatggtgatagtgatggtgatggtggtggtggtgatggtgatagtaatggtgatggcaatgaaggtgatggtgatggtgatcagtgatggtggtgatggtgatggcagtggtggcagtggtggtggtggtgataatgatggtcatggtagtggtggtgatggtgatagtgatggtgatggcagtggtggcagtggtggtgatagtgatggtcatggcagtggtggtgatggtgatagtgatggtgatggcagtggtggcagtggtggtgatggtaatagtgatggtgatggcagtgatagtgatagtgatggtgatggcagtggtggtggtggtgatagtgatggtgatggcagtggtggtggtggtgatagtgatggtgatggcaatggtggtgatggtgatggtgatggtgatcagtgatggtggtggtgatggcaatggtggcagtggtggtgatggtgatagcgatggtgatggcagtggtggtgatagtgatagtgatggtcatggcagtggtggtgatggtgatagtgatggtcatggcagtggtggtgatggtgatagtgatggtcatggcagtggtggtgatggtgatagtgatggtcatggcagtggtggtgatagtgatagtgatggtcatggcagtggtggtgatggtgatagtgatggtcatggcagtggtggtggtgatagtgatagtgatggtcatggcagtggtggtggtggtgatagtgatggtcatggcagtggtggtgatagtgatggtgatagtgatggtggtgacagtggtggtgatggtgatggcagtggtggcagtggtggtgatggtgatagtgatggtcacggcagtggtggtggtggtgatagtgatggtggtggcagtggtggtgatggtgatggcaatggtggcagtggtggtgatggtgatagtaatggtcatggcagtggtgatggtggcagcaaggaaatcattctctgattacctgacatggttaaaaatctgagagcaaagatgagctgagaatgtcatcatacaatgtgtaaagaagctgagcctgagaaccctgaaatgcatggtattctctatgtgcaaacgtacgagagctgaaagtgaccagttacctattcatggttatcatctgcatgatgaagaaacactgcaacctaccttttctccactagagggttggttcactagataatggcacctgcatgccatggatgctacgtatcagtattcaacagtggaagcccactcagcattcaggagtaagagatttggtaagtgataagaaaaatttgcagaactacaggattccatttttgttatgtgtgtgcccagaagagcatctaaacagacatttacccgaatgttcttcaccatgattattttggggctttaggatcgtaaggaggtgattctgattttgtggcttgtacccttctgcaccacccagccatgcagcgttccgcctgcttccttttctcctgtgtgctttaattctagttacaggaaacatgcatatgaaaaaggcacggaagggaatgtatgtttccttttttgtcagaaaataaaatgacacgtttccatttttggagaagttaaaacagattttatctcctgccaccattcttgccttacggacaagaggaggacagggcctccaagcaaatgagcacattagtgagttaaaagaaatatttataaatctagagcatagtctttggcctagaaagacggtactaaagcagacagaagccttttcaggaacacaaataagtattaaaaaaaaaaaaaaaagcaaaaaaacaccttttttgttccctttaaaccagaatgactcttaacctggtcaacaagcacattgcaaatgtcttgttcccactaggtggccacaggtcactgggcgagcgggtctttgtgggcagaggcaggagcggaggctgcggaggacgctccaagcccatcttccgtggctcagcccagsggctcccgcggctccagggcagcgccaggcatggcttctccccgaaggcacagaaggctccgaagttgccacctcttgcctgagttgccggaaatccaagggtaggtttatatcaaatcagcagacaaacttgacttctgggtaaaggctaaaatgaatcaacggagaactgacgagactgtttccccactgacgggtctgtaagagttgggggctgcccgccgcctggtcagtcacgctatgcagctcttaggttgaatcctgggctgccctggctaccaggatgcctcagggaggggaggaagcaggaggagcggcgtggggcgactcctcccaacagggggagcagcgtggagcaaatcttcctgatgggggagcggcgtggggcaaatcttcctgccaagcgtgcgagctgcttgtccccacctgggcgagccacctcttcctaccaggggtgcccatgaggtccttcctaaaagtaagactcagcagggagggttccaaggcctgtggccagcaggtgaatcacacaggagcttcctctaccatgtgaggctctgggggtccttgtctgggtgacggtgtcagagtggactgttggccaccagcaacggggctgcctgggacggccaggggcagagctgctcccatgtggcaccctaccccgagtcctgggtgtctgggctcacacccatctctggcctaccccaagtcctgggtgtctgggctcatacccgtctctgggtgtcattccagcagcaccttctcctcctttcaggatggccctgttcagtcagggtcctgccctctcccactgcacggggaggtgctagagaagggagggggcctgtgggcactgccactcacccctccaacaggcagggagacaggcacctgccccagggatgctgcagcccagcacccctccggcagcctcgcctggctccagcaagagcggaatgttcacaggcctgtccaccgtcacctcctaacaggtcctggagaggccaggccacgccagtgccatcacagactgtgctyrggaagctgaggtgagccccagccggccgtgagccccagcgcccaggcgcctcctcccctgttgcagccccactgggtccccaagtccccacccacggccagtgtttgtttctcyctgaaaacctgatttgacttcactcaaaatctccacacctgctgcaaacgtcagtttgataaacctgacgctgccctcccggctgggggcaggaatctctctaccacctgtgtgagaagaggccgagcctcagagtcccaggccaaaaccctgttagagcagcttagacacagcaccaagacccccctagacccagagtgagcctaaaatgaaaagcaagtgaaagcctcggaccgtgcagctgctcgccagaacgtctcaggaaaactggctgcggcctttcctgtggaatccaaccgagatggcctcagcctgtctccctttcctcgtcctcagtgctcctcacagaccccaagacccacagggcctgcgtcacatgcacagaagccaggtcctctcctacggccatttttgggatcccaagaaagcccccagtgtcccctcactgctgtgcagcttacaccccaagttcattgctcagggcccgctctctttcatcaacaattctccccctgcatcctcttgaaaacgcggccgcacccggcggggcaccatgccagaccacggccctctgcacagcagcaagcccaccacagcgtgtggaccgtgagacctgccaccgtgacttctccccaaaagggcctgagctgggcttaaccaggagggctggggagagctggatgcccttcaccctcgctgggcaagagcctcctcccaggcatgtcccagcctcagggctttgtctccagagggggcaggccctgggtgacacagcccctcagccccactgccctgtccccgaggctggccagcccttccttatctgcacagcctgaagccttgtgtggctgactcggccctgagcttgttctcaccaccaaaggaagagccaagcgcccccacctgctcacctctgccctgactgtcctcaccctggatcccttccctaattaaatccccccgtctgcaacccaggcagggagtttccaccacactctacactgcacagcagcctccatcgcaggtggtgccgtccctgagtgcaggcgccagaaaccccaaggaggctccttggcagagcctgagccggaccagtgaccccgcggcctctcgggaacaggtcagaggctctggagggccttcaggttcgtctggccctaatctccacccacccctcgcctctgccccagcccataacggggccgtcctccaacaatgagtgggcaaaggtgcagggctgaacgcagacagccgcctgctgctcatcaagggaacagcttcctgccgcatcttggggtctatgctgcctggtggggccaggagaccctgagagggygctctgccccaagtcagcctgtccctcctttgccccagatggctcctgctcccacctcctcctgtccccgtgagccacagagcagcagacgcatcatcagtggacactggcaagaccatgtcagtgctcagaagcctccgggtcagccctcagaccaccccatgtgagaaggtaaacccyggcgcccaggtgagccctcggaccaccgcatgtgagaagccaggacactcagcatgagcaggtaaacccgggcgcccaggtgagccttcggaccaccccacgtgagaactcaggacacgtgagaacccaggacactcagcgtgggcaggtaaaccctggtgccccagcaccccaggctcctgccccacccagcccaccaacacacagttgcccaaagtccggattcccagctcgccccaggtcttcctgggcacattctgtccttgcaaaccacttagaggttgagggactgtttatggggtgggtgtgtgcctgaatgtgtgagagacagagaaaaattacccccaatctataagctataggtaagaaaaagtacattttaattttacattaaattgaatactttcaactatattttaatgtggaaattcccaggccagtatgaggtgttgctgtggtcggaccacgctgggcccactcacgatggagtctgtcgtgagagctggagccccacccaagccacagctgcccccggcaggcaggccccacccaggctctgcaatggacacacggagacccacccgagccacagccacccccagcgggcagaccccacccggactctgcctgggccacagccgcccccggcgggcagaccccacctggaccctgcctgggctgccatggacacacggagcagcttgaaaatccaatggtccctggtgtaatttcctcagagattacttggttgatgagaaaagcagtaagttttgttgtttggtttcatctatctggatttttggtgagaattctccactgctccctgtctggggagaagcccagccccatggcagccccagcctctgtccaccatcaggcacgctgggctgtcacacagccacctgtccagggcacccatgacatccggaacccacctcaaatctggcttctgtggactgaaggcggccggcctgcagcctcctagctcctgttcccacggcctcacggcatccgtcactttcgagggtcatcacaatatgaccagaagcccacgggtggctttgaaagagatgaaggcggtgacatacgtgcccagtaaggacgcagctaggatgccaggtggggcaggccaacagcagctccaggcaggaccaggatggcctctgattgtcaaacagatttaaaatttttgctctgaaacactgaaacattccttcccaagcaaggacagagccatgaatccacagccaatctggagttcctctctgggcctgggcagcctctcctagctccccagacaacactcggtgcctccctgcagcctccaccgttaagcaaaagcgtggatgtatgaattccaatttaggttttagctaatgcttgcattccagccattaattgccttgagctaaatacctaattggctgtataaattccccaaatggaattctttggcaccaaaaaaaaagaggaaggcagctaataaccactacagagcacaagacccgtctccataattaggccctgacggactcaggccagggcggcaccacctgcccagctgggcagcccagaagcagcagggccccagggagcccggtggctcagccacacatgctgcccacgcggcccgataaggccgacccgcccagcttgctcccgctgccagagcctcttccccacctctccaggaaacaaagccacctgcacgggtacccggcctgccttgcgtcctgccaggcccctggaaagcaaacatccctccaaggcctgggccagtggtgggctgcgtcaagctgttagccaagcgggcagtgaagacgaaggctgccccgtagccagggagctgacctctctgcgcaggtgccggggtacgagcaccagcagagccgagagcgggggcagtgctgaagcccctgctgccatccacaaaggggcctcagagggttggaaatgacaagccacggtcttgccccaccccggctcctggccatgctacccagccacacggcacagggcaaatgccagcaggacacaggccctcagcccggcatcatcgtcagcccgaggatgctgggccaggccaggtgccgactcagcagggcagcaagagggcctcactgctgagggtgaagccaagcccagcatggcgtgccccactccagccactccaccgccagggctgctttctgggaccactcccaggatgaatctcacagggaaggccacaggccaggtcggcaacaacatgcccccagcagagtggcccagacacaggagcaggctgggtgtctgagaatcatccttagaacacagagagaagtggacttggaaggatataaatcagaacggtaacattattttagtatttattatacattttctaaatgtttcataatagccatgtattgcttcttaattagagaaaatagtaagttagcatgaaaaccccccaaaaagagaagagatctggggaggaggagggaggttggtttccacactgctttcatcaggccagaggcaaacagaagtctccgcagacccaggtctgggcagcgctgcagtgcaggagggtggggtggggagggggtcccctccagaggagctgagtcttcactggcgcctgatgctgaatttgaggcccccaggggagcccctcagcgggagggccgtagcatgaggggctcctcctgcagctcccactcctgggccaagggcatggggcagtcccaccttaaggtcagagctgaactgacaagtgttccccggggctcccagggcaggccccagtgagagttcccctggcactgctgctgggggcatttccagcctaagacgggttcaaggcaaccccactccagtccagccactagaacgagactggactgtccaggtgctccagccccaccagcgtttccaatggtcaggagcaacggcgttgggtggttaggagaccagtgggatgccacatatctgtggggatgaggggcacggcactttgcactttgtgtcactgtggtgtccaagatggaattaaggtgacacccccgcctcctctcaacagatgttcaggacatgaagggccgtgacaggcagcacgtgcccactcagctggattccaggttcctttgtgggactcggcaccacctgtggacaacagggtgtgtttagggtccagggactttcacaccagaggaaaagtaatcctgacttctcttccctcccagtgaacactgaaaacaatcaaacgtcaaagtccgttttctcccaggtcatgcgtggggtagggatggtgtctccaatgacagataccaaaaccaacaattccaggtacatgtcaatcccacaactcaagctcaagaagcttccagaggaagcaagggctggcccaagggcaggtgagggtggtcggcccacagggccctcccggagcagcagcagatacaatcatgctatagttcagtttgctcgaagagtggagtgtcagccttggctcaggagtcaccaagagaggacgatgcacagattcccacaacagcaagacacacagcgcagtctgagtccaaacaaacaccaataggcagaagcaagacacacagcgcgggccgagtccaaacaaacaccaacaggcagaagcaagacacatagcgcgggccgagaccaaacaccaacaggcagaagtgaacccgtgaggcttaattcatagtcaggaacatttggaggagttcagcccttacttctttgccttagtgatttccaaactcatggatgccacttcagtgtggtaatggagccaggatgagtggagagcacgtcacacatcagtttcccgcagcccctgcactggtgacccttagttcattcacaatcgcataatcccttgtgattttcctggcaaacaggaacactaaacctctttttcttcctaaaatatttggtttacaaagttaagcaaaggcaaagctacaacacaaaacgttgctgtagtacagacgaatccaaggtggccacagcacagatgaacctggtgaggatgccgtggtgccacagactgggtgactcacacagaaacgtcctcatggtctggaggctggaagtctgggatgggggtgccagcacagtctgctctggtgatggcctccgcctggcttctcaccgcgtccttacatggaggagagaggactcttcctcttcttacgagagcactggtcccttcacggaagccctgccctcaagaccccatctaacccaatcaccgcccaaaggccacctatcccatcgtgggagccccaccctcacgggtgatctaactcaatcacggcccaaaggcctctcctcccagcaccatcccctgggggtttggccttctacacactgagttcaatgagacacattcagtccataaccgctgcctcagagaatgtcttcccacacacaaggacacatacacacacactggtgaaacacaactgagattcattcttgctttttttaacctcatagatataatagagaaatgcacacaaaaacgcatcgtatagcaaacaatattaagtgaatattcatccaaacagcactcaagaaatagtcccgccagcagctggaacccccacccctgctgcaccttcatggggagccaccgccgacttgatggaagctgtgctcatggccgcgcctgcctctgcaccagattcacggggcctgtcgtctttcacaccttccttctttcactcagcttcatgtctgtgagatgatccgagtcgccccgtcatggctaaattccactgttccattgtatgaaaataaaataatcttcctctcctccaccaccaaagtgcatgtgggtcacgtccagcctggggagactgtaaacgatgccacctacgcgcttccttgcgcatctccctgaccaggcgtacgtgtgcttctgctgcgtggagggcaaggagcgaaacctcagccgcagcaaacacacctctccacattccagcacacctgcccacctgctgtccaagcccccgaggagctcagaggttgtgtatcacagccaggtgcttccaggaactccccgccccacgtcgcagctgcacctggagctggtgcttccggtttttgcccgtctagtaggggagctgctgaatttcatacggcttccgtcttcatcactccaatttaataattaggttgaagaccattttacgtatttctcagtcatttgaattttctccttagaacttctgaaatgttttgcaaatgtttccttcgttgccttgttctcagtgatttgtcagggtcctctctgttttgaacgtgagatctttgtcggttacatgtcatttacatgtgttgaaaatattgtctcccattctgtggcttgtcttttaattaattctctttacggtgtcttttttactaagagttattcttgattttaatatagttgaaattatcagtaatttcctttgcaattagcactctttgtgtcctgtctcaaaaccttcctctccgccctaaagtcatgaaacattatattctcagttgaaaacctttatagtcttgcctttcacacccatgagcacaggagttggtgtctccgaaagaaattcggtccaggttcatcttcttctaatatggattccagctgttctcatcttccttttttatttcaaaatgtcttgaggtccttctgtgtcagcccatctacctaactccgtcttgaagatgaaccacaacttgaagggtgtttagaacgctcgcggttttttcctatgataatgtttcacagaatcattgcgcatttggttctttacacccaggcctgaacatccatcacataacttcccaggagtcaggctggtgagttaaagttatgtgaattttaatttccttagatattgggctgtcttccttaaaaaaattaattccatcgcaaaattattaaaaattcccccacgttttcttccagtacttgtaaaattccattatatttttaagtctctgtgccatctgg

SEQ ID NO: 97413 - DNA, 16458 bp, Homo sapiens
ggctccctcgccttccccggagtgagtaggggtaagcgggcggcgcggcggccacggggtgctgggccgagcgcggagctgacttctctccccgcaggtgccgctcctgcaggtgtccgggccgctcctggtggtgcagctgctggagacaccgctgctctgcctggtcagctacgccaggtgggctgcgggccactggcagggagcgtgggcatgggatgggcccccagcgccggggctccgtgctggactgtggcggcggggctggctgcccaggggtcccaggactggcctcccgcccccactcttcagggtgtaaggaggggctgggtgagggtggagctcccaggttggaagttccaggccccaggtaaccgccgtcttgggtggcctagtgaccctcaccctgggaccccctgactcttggctccccacagcctggtggccaccaacgcagcgcggcttcgcttgatcgcagggccagagaagcggctgctagagatgggcctgaggcgggctcagggccccgatgggggcctgacagcctccacctacagctacctgggcggtgagtgtctggtgcggggcaaggcaagggccgggaaggaggagccccatcttggcccgaggtcccccaatcccaccgccttcctccccaggcttcgacagcagcagcaacgtgctagcgggccagctgcgaggtgtgccggtggccgggaccctggcccactccttcgtcacttccttttcaggcagcgaggtgccccctgacccggtcagtccctcctctaaaccctgctgtctccaggcgacaggccccaagccagcccttgccctggcgagaggtgtgccacccaggcaggtcaccccagtgctgtcccaggaagctggcacgggctgcattacctttgctctcaaactagggtgtccctggctgctcccaggcctcatcctgcattcctggcccccattcttcaccgactctgttccacagatgttggcgccagcagctggtgagggccctggggtggacctggcggccaaagcccaggtgtggctggagcaggtgtgtgcccacctggggctgggggtgcaggagccgcatccaggcgagcgggcagcctttgtggcctatgccttggcttttccccgggccttccagggcctcctggacacctacagcgtgtggaggtgagcccgggcactttaggggtgggctcagcagaacctcagcagcctctgactcccttatctatttctgcaggagtggtctccccaacttcctagcagtcgccttggccctgggagagctgggctaccgggcagtgggcgtgaggctggacagtggtgacctgctacagcaggctcaggagatccgcaaggtcttccgagctgctgcagcccagtgagtttcccggggaggaggtgtgcctggtgggagatccccggggtttgggaatgggcagggaaggacagtgaggtactctgctgaagtttcagcggtgatactgcaggccgtggcagggaagtaagtggtggggctccctaggagctcccaagcagaaggtgagcacaggtgtccttgactgaggcggggcggggagcagggggacaccagggtgaatcaggaagacccgaggggtggcccccaccctttctccacccacgcggcaggttccaggtgccctggctggagtcagtcctcatcgtagtcagcaacaacattgacgaggaggcgctggcccgactggcccaggaggtggggtggatgagtgggtaggcggagggtggctggggggctctgggggcccctgcaggttctggctgggctcattgccacctccttccccgcccagggcactgccacccccttccccacccagggcactgccacctccttcccccacccagggcactgccacccccttccccacccagggcactgccacccccttcacccagggcagtgccacctccttccccacctagggcactggcacctccttccccacccagggcactgccacccccttccccacccagggcagtgccacctccttccccacccagggcagtgccacccccttccccacccagggcagctgggctcacggccacccccttccccacccagggcagtgaggtgaatgtcattggcattggcaccagtgtggtcacctgcccccaacagccttccctgggtggtgtctataaggtagggacagtgtcgggggcccaggtgggggcaggtctgagggatggtgctgggtgggggataaggaccagccagctcaacgccctcttcctgcagctggtggccgtggggggccagccacgaatgaagctgaccgaggaccccgagaagcagacgttgcctgggagcaaggctgctttccggctcctgggctctgacggtgaggccctcccatcccccctgctgtccaccttcaaagcaccagggcccccgcttattcttgccccgtccacacagggtctccactcatggacatgctgcagttagcagaagagccagtgccacaggctgggcaggagctgagggtgtggcctccaggggcccaggagccctgcaccgtgaggccagcccaggtggagccactactgcggctctgcctccagcagggacaggtggctgccccaccgccctcatcctgacccccagccccggtagagccctgactgggagctagccccaagcttctctttccttacctcctccctgcagctgtgtgagccgctcccatccctggcagagtctagagccttggcccagctgtccctgagccgactcagccctgagcacaggcggctgcggagccctgcacagtaccaggttggggggaggcccaccctgtcattctgccctgtgcgcccccgccctcaccctgcccaccgctcctgtcctctgctccctgcaggtggtgctgtccgagaggctgcaggccctggtgaacagtctgtgtgcggggcagtccccctgagactcggagcggggctgactggaaacaacacgaatcactcacttttccccacagcttgtcctgtgttgtttgtgtcgtttgttcacccagcccacgggctgcgcctcccgggctgcggctgggctggagtcgggaatctgagctcgaggtagcaggaagatttgcatcccagtgaaagcacaggccctgccggcgtgggagacagccctgtgctgaagcccgaagggcagtgaggagttccctggctttgggtgggctgtggggagtcagatcccacactagaactacaaagccacaggcagggagggctttggtgtctgccttggagttgagggagttgctgcagacctttccttgctagaggcaggctggggacaggacagggttgggggtagtgccaggtaagagggtccagccgtggccctgggctcccacgcctgcctaggcactgccccccaggctcagggtcagtgaagacgtctcaaactccccaagtcaaaagggagtgctcaggtgtctcctgccactgctgctgccaacccagcaccaccctggcatctggcgtcagggacacagctcctgacccagcagcccacggaaggagaggaagaatggggaagaagttgaagctccaggagatgactcagccccagacacctggccggagtggcactgcacgtggctgtgctgggctggccctgcctctgcaccagcaagttcctgatctcagggttccgccagtttgggcaacgtgagcttcaagaggaactgcttgggggagaggttctaggcttggcaggaagtggaggctgggggcctgagcctctcttgtcgaagcagcctgaggtggcacagacaggcaagggtgtggggggaatgctgaccgcctggggcacttccgtctgcccaggcattccaccagaccagctcacctggctccccgggcttcagggtgggcagcaccactgtgtggttggctgagggtggagggtggggacttggagcagaggcccagtccagccagccccggggagtacgagctaggagagagatacagactcacacacattggacagaacacaccacaccccagggcacccgcgcactccgaggggcccagccagagtggctgtattcttccgttcttgcactgctgtaaagaaatacctgagactgggtaatttctaaggaagagaggtttaattggcctgtggttctgcaggtacaggaagcatggctggggaggcttcaggaaacttaccatcttggtggaagcggaagcgggcaggtcttacatggccggaggaaggggtggggcggtgccacgcacttccagacaaccagatcttgagaagtcttatcatgggaacagcaccaaagggggaagttgcccccaggatccaatcacttcccaccaggccccacctccagcactggggattacgtttcaacatgagatttggccaaggacccaggacccagaggggcctgcacaagctctggaggggccaccgctcctctggtgtcttcactgccccctccacacctccgggctgccccaagctcacccagtcatgcctgttgcaaggtgtctgacagagccagcgtgcagggggcggagccagcgtgcagggggcggggccagcccctagccccaggcccagtggggagctgactgctgcgtgggggctgaatcaggcctcgactcagggtggggcccagactcctggaccctgcgaggacctcctcagagctgtccacaactgccctgagctccctggtcaacaggggctggtagtcagggtgggggcccttctccccctttcttcgtggatctgccagctcttggggatcctgttctcagggccctggtgggtagagccacaccacaggcactcaggctgcaggtggccactcccctccagcagcccaggcaggagggcccctcaaaggcccattgtaggcacgtccgtgtggctccccagcccccgcaagctcacgctagcgcacgccaccacgcccgtccgtggtcccgcccggggcggcttctaggtcagtcctgggcacaacttcgcaggaggagcagcggcaggtgctgcaggcaagggccgccatggctgggggtgtgtggggccggagccgggcccgggaggctcccgtgggggctctaaccctgacagcactgactgaaggaatccgggccaggcaggggcagccccagggacccccttccgcaggccctcagcccaagtcctgggaggtcaaacctgaggctgagccacagacccaggcactcaccgccccgtctgaggcagagcctggacgtggggccaccgtccctgaagctggcagcgagccctgctccctcaacagtgccctggaaccagcccctgaggggccccaacaggtgaggggtgagggaagggatgttgtgcgaaccggcctgggggtcctgtggatggtaggtggaaggcggggtggcaggggggcggtgctggccccgggggaggtcagcgtgaaacaggctggtgagcaacagaggagcaagggattttgtaggaagccaggtgggaggccgagggaccaggaggagagctaggagaggtttgggcacttcagacgccccacccatcctgccctaggttccccagagttcctgggaggagggagttcttgccgacctcgcgttgtacacggctgcctgcctggaggaggctggctttgcagggacccaggcgacagcgctcatcctgtcctcagccctggaggcccggggcgagcggttggaggaccaggtcagccttcacccacttcatgccctacagaatcctgccggttcgggcaccaaggtggtgggaggggcctggagagcgcagcctgaccctgccatcttcaggctgctcctgccaggcgggatcagggtgggggtggaggtggggtgcaggccagaggggaatggacggtggaggaggcctgactgctgaagtctgcccccttccccaccaggtgcatgctctggtgcgtgggctgctggcgcaggtgcccagcctagcggaggggaggccctggagggcggccctgcgagtgctgagcgcactggccctggagcatgcgcgggacgtggtgtgtgcgctgctaccccgctctctgcccgccgatcggtaacccaaccgtcctggccctgcggtccccacgcggcttccttccctcttcccgcttggcggtggagtctggccccagaagagggagctgaaaaggggcagggcctccttattccagccccgcgatgactcatgccccgtatccattcccgctcccctcatttttagctccgcaaactccccccacactcctgccacagagtttctgatgctgggctcctctcttggagccaccttctatcttcgggtggcctcccctggagaccgtcctggggttggctccggagtggggtgaatgaggctggggggctaacgtgcctggacacccctggctctttggttaattggccccagaagttatctttggttttattctctgtggcaatttttttctttttaataatgccaggtttgtttcactgtcgctgacccaacgggactcccagtgggtccccaccctgcagctcagcttgagataggctatgttgtggtctgcacaattaacccttcatttgtttctctgagatttggggatggggggagatggaggggtttcctgcccctcccctgctggagtcctactggctgcctccaccctggctggggactccctacatcccctggacacccacccatctcttgtctcacaccagccccctccaaaccctcagggtagcagccgagctctggcgcagcctaagccgtaaccagcgtgtaaatgggcaggtgctggtgcaactgctgtgggcgctgaagggtgcttcggggccggagccccaggcactggcggtaggtggctccagccattaccagggggtgggggcaggggtggggggtggcgaggagcggggaggatgggcatagggagtttgcacctaggtaactgctcctggaatgtcccatgcgtgtctgaggctgtccccatcctgttgacagcacgcctgtccctctgctgcccagtgcagctccaggcgtgccccaggcctgagtgggccacttgctccacaggccacacgtgctcttggggagatgctggctgtttcgggctgcgtgggwgccacgaggggcttctacccacatctgctgcttgcgctggtcacacagctgcacaagctggcccgcagcccgtgctcccccgacatgcccaagatttgggttctgtcccaccgagggccaccacatagccatgccaggtgagaggcaacaccaggttacgtggggcgggccagcatgctgtcaccctctcagctcccactgcccacctgctcactgtccccaccaccagctgtgctgtggaggccttgaaggcgctgctcaccggggatggaggccgcatggtggtcacgtgcatggagcaggcaggaggctggaggaggctggtgggagcccacacccacctggagggcgtcctgctgctggccaggtgaggagggtgaggaggggccccagggtgtcacaccaggaagagagtcgttgctggccaggtgctgggcagggggacagggaaaaggcaggggcatgagggtggtgttgggatggggtcttctcgaggagaaaggccgccaaacggagcgagagctcccatttccacccaccccagtgctatggtggcacatgccgaccaccacctgcgaggcctcttcgcagacttgctccctcggcttcgcagcgcggacgacccgcagcgtctcacggctatggccttcttcacaggggtgagcctgcttcccggatgggtggtgaagggtgaccctggacttgatccctgaatcgcagcggcctgcacggggaccgcgggcgtgctgaccccatgtgcctcgcctagctgttgcagagccggcccaccgcacggctcctgcgggaggaggtcatcctggagcgactcctcacctggcagggagaccccgaacccactgtgcgctggttgggcctgctgggcctgggccacctcgcgctgaatcgcaggaaggtgtgagagaaggggaggggtggagaggggcttggcccggtcgcggcgaggtctgcaagaggctgaccccgagtcccagcaggtgcggcacgtgagcacgctgctgccggcgctcctgggcgcactgggcgaaggcgacgcgcggctcgtgggtgcagcgctgggcgccctgaggaggctcctgctgcggccccgggcgcctgtgcggctcctgagcgcggagctgggaccgcgcctccctccgctactggacgacgtgagcaaacgccccgcctccgggtcccgcccctcccgctgtcaccgcccccgcccctccagtctctccctcccaggccccgcccccgtctctcccgcccaggccccgccctctcaggccccgccccgcccttccagtctctccctcccaggccccgcccccagtctccctcccaggccccgccccgcccctcctgtttctccctctcatgccccgccccgcccctacagtctctccctcccaggccccgccccgcccctctagtttctccttcccatgccccgccccccagtctgtcagtctgtccctcccaggccctgacctcccaggccccgccccgcccctccagtttctccctcccaggccccgtccccccagtgtctccgtcccagatttcttccctcctgaccgcccccgcccctcccgcctgctgtcgcccagctccgcccctccaaggccgtgtcccgccaagctcctccccgctcgacttttccttccggaccccatcccttcaagccccaccccctgcaggggctctccaggcttcccaaccaggtccagctccaggccctgttccctgtccccagatcacaccgagtcagcagccttccctagacccgccgcttcctcgctccgcgctggccgccccctcccacccttgcagcccctctcagtctccgcctgccctgactgcgccctcccacgcagacacgggactcaatccgcgcctcggccgtcgggctccttgggactctggtgcgccggggccggggcgggctccggctggggctccgcggccccctgcggaagctggtgctgcagagtctcgtgccgctgctgctgcgcctgcatgaccccagcagggacgctgctgaggtcagcagcccccgacaccatcccacccctatgccatccaacactcaccactcccaccgtgcctcccctccgacaattacaggtcagggactcacccatcccaaggacctcagtggcaggtgtgacgggcggccaggttactactgctcttcccttgagcagaatcaatccggtytcctgccctgggctcttctgcccctcacccgatgccyttgctcyccctcttcccaccccaccttttgcctttctacttcctggacccctgacccggctcacttcccctatcccagagctcagagtggaccctggcccgctgtgaccacgccttttgctggggcctgctggaggagttggtcaccgtggcccactatgacagccccgaggccctgagccacctctgctgccgcctggtcagtaggggaagcaaggtgaccgcaagggggtatgatcagcagcccacttgttccagggttcaccggggcccccaaccgtttctactgcagccaaaccagataggctactggtggggcaagtccaaggtctccraccatgccacctgccctgggggctcccctggaaccccggcccctggattcagctctgcagcctcctccgcactcaggatcagccctcctgtcctgccactagcccttttgtccccaggttcagcgatacccaggccacgtgcccaacttcctgagccagacccagggctacctgcggagtccacaggaccccctgcgccgggcagccrccgtgcttataggtgaggccgcccggggtcacactgcccctggcaccggggctttgggagctgggccagcctccccctggggggctgtggggcctgcactcatgcatctgctgtggtccaggcttccttgtccaccacgccagccccggctgtgtcaaccaggacctgctggactccctgttccagggtgaggccccaccttgccaggggatggtgtcctggagacgtggctggtgctagggcggagtggacgggagcggtgggtggagggccaggggcccgggcactcggccctcctgggctccccagcctgagccgcgatctcctcgcagacctagggcgactgcagagcgaccccaagccggctgtggccgcggcagcgcacgtgtccgctcagcaggtggcgatgctggcccgtgcccggggctgcccccgcgggccccgccttctccgcatcgccccgcgccccgcccggcccccaccagtcttcgccgacagccccttccagcgccggagcgtcgcgggccgctggggctgctccggaccccgccgagcctgaggctcggggctggggccgagggccagggtccgactcgggcaccccacgcgcatagcagcctgtccccgccctgacggaggggctccctgggcctggtgctggacgccaatgccctcccccaccccccacccccgtgacccctcttcaggcacccaccaccctgatggtgacagagggggacagccagcacccatctgtccccgtcagggctcttgttctcacagccccctggagcatgccccatgccccaaccttgggcctggctcctggcccagatggcacctggcctcttgagtctgctgggggaccccaaagttggtggtcccatagcctgccctcctgggtctccacctcatgcctggacaggacgctgtggcctgtccgggccttggccagccctgcagctgcacccccgatcctcatccctcaccccattccctgccagcatcctaaggctcctggcgggcatcctctctgctcaaaattattgacctgtctcccggccacacctgctgtgccctctcagccaggccatcatcaccccctgttcattatgtcaggcctcatgggagcctggccttctccagaagctggccccggcgtcctcccaagctggaccacgtaggccccagatcacacctgggggtccagatgtaggggtcccgtgtgcacgcccaatcagaccgagcacttgtgacactaccccaacacctctcccagggctgaatgaggaacgcgccactggacacatgaggaagaggctgccctgggagctactgatgctgtgacctcacctctctggctttgggcggcaggtccctgcacctaggatgcctgcctggaaatgtccttgcattcgtggcctccttcacagcctcctcctcagagaagcctctgcgagtgcacagggagtgtgtgcagccttgtgaagggctgggaccacttgcccagactggggcccctcaggcacaggcgtggggtcctactgacctgtctccccagctcccacacagaaagcatctaaaataaacacacgtggatggaaagcgttgggcatctgttttgagtgtggttatgggagctgaccctggtccaagatctggctcaggctggggtaataggccatagtccctgatatggccccaggtagagtcagtttggcagcagggttaaaggtcaggcaggctccaggcacaggctatggccaggtcaggttgggttaaccctaagacagagaagctgcgctctggtctaacaggcatggaatggatggggttagagctgtcagcaccggggtgagtgtctctttgcaggtcatatgcaggaagctgaggatcaggtgaagggcccgggtcttcgtggagtcaggggcaaggtttggtggatgagtttggagcctccacagcagataccaaaacgggattcaacataccagaaacagatagagagaaagaggccagagaggccagaggccaccagatgcccagtgaaggtcagatagacggaagccccatggacgtccgtgctagccttcaggaagctctcaaaccagccatctgtccgaggtccgcacctcccaggacgggctaggagcacccatggggggcacaccctcggcactggcggggacgggtttcgggacacagccacatggatcgtctcagtagcagccccaaagagggaagcaagcccggcctccttgctcaccttgcaaccaggagccaggccccagggcaagcatgtgctgcccacctagcacaggcttgcccacaccccacagcacgctggacagtctggtgggcaaacccaacagtgatgccacgctcaccccagatgggggctgaggcggggagctggctgtggtgggcaggcagcacccctgcgctcctccccctccctcatggtgcccgggagagtccgcgccgtcctgcggcaggctgtgtgcagcgcaggcgggcttgccccatacagctccctgttaggagtgtgtccagccccgccttgctctggcactgcccagaacctggttgccctgccaggagtgagattcatgcaaagtccacatggcctctagagtgtgactcttccctgctggaattcctgggaggctccaggtggcacagtgggctggtccctccatggggatgctgtgtccccagggtccatcagatccacctgcagagagcccaccccagggcaaatattccaacggggtctaagattggagggcaagagggcaggtgcaccctgacactcattccctttccacctccagccagtgggccgggacagtcttggcctggatgcccaaacaatctctaacgggccatgttgccagagagctcattggtggtgcagctctcaagatggggctcaggtgtggcctgtcacatggcatggccttgccggtctcagggccccgaggctgtgccttgtgtgcctgcctttccaaatgctttctaggacccgggctactcccaccccactcaccctttcaagtcacccgaaagggttttcaaaggaggaccatgagtctgagaggcgttgagtttgttcctacactgtgggtaggagtgtctaggagattctgtaacttggatctgagatactggagtttgttttgtctcctgtttcaatgttaatgtcactattcatagcaataccccatctctacaaaaaatgaaaaaattagccaggactggtggtatgtgcctatcgtccagctactcagcaggctgaggcgggagaattccttgagctcaggagatcgaggctgctgtgaaccatgattgtcccactacacagcctgggtgacattgcaggaccctgtctctttaaaaaaaaaaaaaaaaaaaaaaaaggccaggcgcggtggctcacgcctgtaaacccagcactttgggaggcggaggcaggtggatcacgaggtcaggagaccgagaccatcctggctgacacggtgaaacccctgcagtgagccgagatggcgccactgcactccagcctgggcgacagagcgagactccatctcaaaaaaaaaaaaaaagtctgctgggtgcagtggctcacacctgtaatcccagcacttcgggaggccaaggtgggtggatcacaaggtcaagagatcgagaccatcctggccaacatggagaaaccccgtctccagtaaaaatgcaaaaattagctgggtgtggtggtgtgctcctgtagcctcagccactcgggaggctgaggcaggagaattgtgggaggtggaggttgcagtgagccgagatcacgctactgcactccagcctggcgacagagagactccgtctcaaaaaaaaaaaaaaaaaaaaaaaaaagtcactgttgggcctggataccaggttttctggtggatttaatgtcccagttgtagccaaatccactgttccttctcttttgcaagctctgcaagttgtgtggccattgtgtgccctgacagaagtggggaaggctggcgaccatgtgcaggtagactggtccccaccaaggaaggttgtccactctcccaggaacaatcactccccggccacgtcaagtgttgcgtgtccctccctggacgtggaggccacagctgctgagctcctgcaagtaagcaactggatgtgaccctggacctgcttaattcccacaggccggagacctcctctctccaggctcttagctcaggcaagcagatgtgggtgaaatgtaccaaaggtcagtttctttagtactgcttccccaggaacctcctgtgtggccccaggagggcagggcctgtcatcagtcacacctgcacccctaaagcccctgtgggccgaggatggctacacccttcagcacatgcctcaagctccctgaagcagaggttcctgccatgcctcagccacagacacgcctggtggaactgtctcacctaaatcgccctgcccttcctcacaggtagagaaacacacaggcaggggtgggcagggccatgggcccattactctagagagcggccaagcccagcatggggctccccttagctccagggtgcaaaagaagccgggcaatgcagacatcacctgcacttggccctgatgtccctcctgatcatgcatgggtactgtccccacccctacccaccctaccccagatccaggacccctcaaaaactctgctaccagcctttccttcgtatgccacctttattgtgtttccccaactcctgggccccatggtagactggccacatggctactgggctcctggccttcctagggctagcagctggtgggcaaacactctgccctgctggagagctgccaggccatgcccgggcacaggctagtggggctcctggctcagtcctgatagcagtgccagggaggcgtagagtgcacacatgcggccctgggcctgcggctcccagcacacgtggggagtgtcctcccccagctctaggccacactcgtccagcaagacccaggccggtgctccttcgccccagctgttccccaggagcccggggggcagggacatggtgctgcgctcctgccacggggcactctgctccaagaggctgcccacctgccaagacagggcaggagtgagtcagatggggaaatctgggcttcttgtgcctgcccataccaccccttcccaggtgccacagggccccttccactggctcagcccatcctcctgcagcccgaacccaaccctctcaccagctcgagcggccccaacagggtctgcgactccagcgcctccgccagcagcttgtgctgcgtttcactcagcactgggagagagtcaggtaaaagggggtttctgaacgcccaccgggaaagcccacctccctccctcccacccgccacctgcccccagcggccgctcactggtcagtgcccccagcaggtagacaacagggatagcgagttccggcaccagcattccggaggacaacaccaggcactccaggacagcacctgctggaccgtccaggggctccaccggcccaaggctctggccctgctccagctgtgggcacgggaagggcaggtgagtctggctggctgggcaggccttgtgtgccccgggcaccctcccccgctcaccgcctcctccaaggctcgcagggccagctggtcccgcagcaccccctccaggccctccagcagcagctggcacagctctctgtccaaaagctccagttccttggagatggtctccacctctgcccgtaggccctggaagtcttcagtgaacgccccctccgcagggaccccatctgtagggacagaagggctggcactgcccaggtgcttacagggccctggaaagcctcggtcaggacaggcagaccccagggggcaggagagcccaccaaaggtccccggggcggtcaggagggcactgacctgtcaggaagttgtggaggcacctcatcatggagaggccagagggcagctgtggccaggcgccttcgctcgtggaacgcttgtggcctgggcaggggcatgggagggcagggctggtcagtgccggggaagggtgtctgagccagagagggctgaggccttccccaggccgtcacagccccgctcaccactgccaacactggcagcccagggcaggaagggaggctggggaggcccagggtcagctgtcctgtgttgccccttgtgtgtgtatggggggtgcccaccgcctcagggggctgcccggcctccctgtgccctgagaacatgaggagaaggcctcaactgcccagggagtgtgcttttcccaccggacaccccatgctgggggctcttggctctcacctgtcgcgggtggctggaaggtcctctgcttcttatccgggaagagaaggacgtctggcagccagacg

SEQ ID NO: 97414 - DNA, 47984 bp, Homo sapiens
  misc_feature (1)...(47984): n = A,T,C or G
agtcccagctactcgggaggctgaggcaggagaattgcttggacccaggaagcagagcttgcagtgagccaagatcatgccattgcagtccagcctgggcaacagagtgagagtccatctcaaaaaaaaaaaaaaagatagtttcattttctttgacagtaaacatatcaggcttggtaacatctagaaactaaagcaatgcaaattagaattaagaggatcttacctttacaaggctcaaatactcaactatcccagaacgtactgcagaagacagttttctaactgattcatcacagacccaacaatgaacacctctccttccagaatatacccagagacgatgcttaaatccaaagtcctctgaggaagagagaaataataggttttaaaacaaatctataaactccttaattaatgtatattaaattacttgttgtttcctgtgctccccatgttcttgcttcatctctttacccatcctggtctctctgctgggaatttctttcttttttaaaaaactattttattaggccaggtgtggtagctcacgcctgtaatcccagcactctgggaggccgaggtgggcagatcacgaggtcaggagttcgagaccagcctgaccaacatggtgaaacgctgcctctactaaaaatacaaaaattaactgggcgtggtggcgtgcgcctgtagtcccagctactcaggaggctgaggcaggagaatcacttgaacccaggaggcagaggttgcagtgagccgacattgtaccactgcactccagcctggctgacagagtgagactcgtcacacacacacacacacacacacacacacacacacacacacacacacattaatgagatttgatcacaaaatacagagactaatagttaataatagtcagaggaaaaccgattcttacacttgaccccattcagaaactgctgatacttgcccttcaatgctctgtcaatgatgcgtatggccattgtcatgagggtccagcacttaggacatatgtctgcagaactaaagcagagtcatcattactcattgtcagtgataccacccaccctaacagcaagacacacagtgctcacctacaacatctcctcacatcgtcatagtctgtcatgtcaatgtcaaataccagttctttttcctgagcctggaaagctcccagcttcactgtattgtgttgattgggctacagatacaaaatattgatcagtttctataagagctgccacactgctaaatctgcttattttctacacatatggaaaaagttgccaaacagaaataaagagactatataatgccaactttatgacagtgaaagttcattattttggatcttacacatacactattgatgagagtcttaactttcaccaacttaaagcagggtttaatgaatacatatccatcataaatgtttgttggtcaataaggataataataaagctgtttttagttttctgacaagggaacgtatacaaataatggcctattgcaaggtgttttaagaacctttacttgttaccatacatagaagtatttaaaatttttcaataattcaaaaagatctccccaattagtttgaattgagactttattataaagaggctatgagaagctgggcacagtggctcatgcctgtaatcccagcactttgagaggctgaggcgggcagatcacttgaggtcaggagtttgaaaccagcctggccaatatggtgaaactgtctccctactaaagatacaaaaaatagccgggtgtgatggcatatgcctgtagtcccagctacttgggaagctgaagcaggagtatcattgaacccgggaggtggaagttgctgtgagtcaagatcacgccactgcactccagcctgggtgacagagcgagactctgtctcaaaaaaaagaacctgagaggttaattccaccataagtttttataactgtaagtcagaagggagtgattactgaggagattcataaaactaaatcttaggctgtcagtaaggaaagataagaggcgcaacccaatttatacctcagaacccccaaaaggctcagggataggtgataccaggtattgttggaatgagtaagtgcgtgtttagtgaagctgagatgaaaaacaggaagatttttcaaggccacccttgactgaaggaaaaaaaaaaggaggattggttcaaagcatagttaagaagcagttagctacccagattcgtacacttagcttgcagagctaggtgactgctctttcatttccctggcagaagacacctgaattattttccagagagcataaaacagaaggtccctggacttggacaacaagtacaattgaagagtgtgttgtattgatattacaaattgatattaggggaataattagacatttatatgtggaatgttaagacccagccctttccacccacttctgtactcttccactaccaactcaggcaggaagctagaagatttctctctaaataatctgaacagggctgggcgcagtggctcacgactgtaatctcagcactttgggaggctgaggcgggcagatcacgaggtcaggagatcgagaccaacctggctaacatggtgaaaccccgtctctactaaaaatacaaaaaattagccaggcgtggtggcacacacctgtaatcccagctactcgggagggtgaggcaggagaatcgcttgaacccgggaggcggaggctgcagtgagccgagatcatgccactgcactccagcctggatgacagagcgagactctgtctcaaaaaaaaaaaaaaaagctttagctaaaagaaagtggttgcttctgggtctgggtgtggtagctcatgcttgtaatcccagcattttgggaggccaaggcgggtggatcacttgaggtcaggagttcgtgaccagcctggccaacatggcaaaaccccgtctctactaaaaaacacaaaaattagacaagtgtggtggtatgcgcctataatcccagctacccgggaagctgaggtgggagaatcacttgaaaccgggaggcagaaattgcagtgagctgagactagccactgcactccagcctgggcaagagagctagacttgtctcaacaaaagaaagaaagaaagtagttgcttctgggtagcaaaaaatgagggggaagggtagcagaattttttttagacagggtctcactctgtcgcccaggctggagtgcagtggcgtgatcttgacccactgcaacctccacctaccgggttcaagcaattctcctgcctcagcctcctgagtagctgggactgcaggcatgtgccaccgtgcccggctgtttttgtattttttggtagagacagagttttaccatgttggccaggctggtcttgaactcctgacctcaagttatctgctcgcctcagcctctcaaagtgctagagttacaggtgtgaaccaccggcccagcctggtagcagattttttaaaagccgaatagaagtacttgattttgtaaaccatgtgcatacataactgacaaaaatcacaaaacaaaacacaaaaagtaaataaaggtctatagatgcttctgtcttggcccaagaaaaaaatgagacgttttctccctttagaaattaaggagaaggaagtagagagtggcaccctaacccttcttagaagttcattttcagttttattctcaacctataaaggggaagtaaaacaactccaaagtatttttttctgcctgccttttattacctcttctccccttactttgatgatgagagacgggtctgggatttagagtcagaaaccctgggtttaagtgccagctctatcatttagaaattgtgtgtgagcttgtgcaaactattcaagttctctgggcctgtttcctcctttgtaaaaagaatgaggattgatacaagtaacaagttatataacatgaaaaactccacataaaagctattatgctatgtatgtattccctccacccaccagtgtatatatttgagaaggggaagaagggcaattttggtttgttcattcactcaacaaatatttatagtgtactgtctcttgccaggcactcttctagggtacttagaatataccagtggcagggggtgggaggagtggcaggttttagtagacctcactgagaaggtgctatttgagcaaagatttgaaggaggtgaggggatgaaccaagtatagaaatgggttttaggcagtggaaacagcttgagcaagggtcagtgtggcaggaatgaatgagggggagagaaggacttttagtcagtgaaatgagcagccaccagagaatgttttcagcagaggaatcacagattctgagttgttttaaaaggattactctagcttctgtattgacaatggactctagattctacaaaggcaaactgttaggaggtttttacagtaattcagatgagatgataatgttggtagcactggtagtagtggctggattttagatacacttatggtagagccaaagggatttcctaatagaatgggtatgggaatgtgagaaagagaggaatcaagaataactccaggggtatgaaggaaaaagaatataaatgtttattatgactgaactgtacacttaaacgtggtaaagataataagttttatatgtatatttgacctcaataaaaataaacaattaaaagaaaaaaagaataacttccatggtggaagagaatgtaattctcttttatttccctctttttttttttttttgaggccaagtctcgctctgtcgcccagactggagtgcaatggcgcgatcttggctcactgcaacctccacctcccgggttcaagcgattctcctgcctcagcctcctcagtagctgggattacaggcgcgtaccaccacgcscggctaattatttccctttcctaaatcatgtcgacttcctcttcctagtagctagatactcaattttttttgtcctagtaaaaatgcaaccaattcactcccaaatgatttcatcagtaatgcagaacgtcaaagaacaaaaaaggattaatcacttgccaaacaattaaaaagtggcttttcatctagaataaactctaaaaatttaatctcaaaacgcaagaggaatcaacccattcttggtttacaaaataaaacaacaaaatatattaaaaaaagatttcttactctgtgagaatatactgcgcctatatcaatcttgtatggattcattttctgcatctccttttccagatcactctggttgttgaaggattggtagcgaatgtaaatatcatctttcartgtgaatgaaaattcacggtgttgaaagtaattctttatcactgcaaaataaatgtacattttaaagttaatttgctactttatttggctcagggcattataattttagccaatgagaagttttttttttcggtgagggaatcttgcttgcttcctgctctgtcgcccagactggagtgcagtggctcgataaaggctcactgcaacctccgcctcccgggttcaagggatcctaccacctcagcctcccgaggctgtagctgggactacaggcatgcgacccaccatgcccagataatttttgtattttttgtagaaacggggtttcaccatgttggccaggctggtctcgaattcctgacctcaggtaatccgtcctcctcggctttccaaagtgctgggattataggcgtaagccacggcactcggcccgagaagatgtttttaatgagccccctatgctcaacaccgtggtagatgtaaaagaaaaacaaaacaaaatccacatgacctagtccctaatttgaaagcagttaccattccgtatttgctagggaacggtacaaaagatgaaacagatgcataaatattttaaatatgtaatgccacccctctctcctcgattcgcactaataaattcagctgcaaggaagaaagtatttctcttcctctgagagaggctcttccgctcctgatgcaaaccatgcctcagcagcttcacgctacgccccagtaaccccctgggcaccgctgcaggtaaacggggcacctaatgtgagcctgaccacgcagaggtaggagcggcggctctgtttttttttttttttttttttttttacagcgtggccgcaggctggcttattatatcctctctcggcccatttacacctatgaagtggtggggcgggctcgagaragcaaatgaaggcgcgcggcacaaagcctggtgcacaraaggcgcttcatattgtcattctaaggacaccccgcctccaacctcctcacactccgctcccgaacccattcctcgcctccatcacctccaccgtagttgagccagcgatagtactgagagtagggaaagagcctccggtaataaagtttaagcagctcgggcagctcggtggggkcaaacgtctccattgagcgcggaactcgccacggtaaggattaccacaggaattggcgggaacagcacggccggcggccccgcgactgcgcaggcgcttatggccgaggtcggctgtctgacccggcggcccgcagtccgccggggccgccgggaattgtagttcccacttggtgcgcgcgggggctgcgggagacgcagcagtttgcgatctgcccacgcgttcgggcactagggccaccgctcttgtgggcagaaggccgcgtccattccaggaagaggatcttctccggaaatgtgagacctatagcatattgatttaggttattaagatgaagtaaaaaggatgctccacgtgaactttttggatgttttagaaataacaccagtatctttttttttttttttttgagacagagtctcgctctgttgcccaggctggagtgcagtggcgcgatctcggctcactgcaagctccgcctcccgggttcacgccattctcctgcctcagcctccctagtagctgggactacaggcgccagccaccacgcccggctaatttttttttatttttttatttttttatttttagtagagacggggtttcatcgtgttagccaggatggtctcgatctcccgacctcgtgatccgcccgcctcagcctcccaaagtgctgggattacaggcgtgagccaccacgcctggccgacaccagtatcttttaaaaacgtttgtaggcaggtgcggtggctcatgcttgtaacgtcagcactttgggaggccaaggcaggaggatcgcttgaggccaggagttcgagaccggttggggcaacattgtgagatctctgtctacacacacgcacccacacacaactagccagatgtagttgcgtgcgcctgtagtcccagctaccctagaggctgaagggttgggggcggggagtggggggagggggcaatcaatctctcgagcttgggaggtccaggctgttgtgagccatgatagtgccactgcactccagtctgggcaacagagaaagaccgtgtctaaaaaaaaaaaagttttggaaattagttcttcatggaatttcatgaattactagatccaatatgtggaaataaataaccaaatgagaaaagcataggctatttattcagagcttactatagcaagggagtcagccatcatcacttgcatttgacaggactcaaaggcaggcagaggagtaggaaagctttataaaaaagggaagccgtcaaggtattctttgattggaggctgttggcatggagaagctgtacctgggctaactagtagtaggatgcggtatgtgattggtttaggggtgggtgtttggctttctttggttggacctatgttggaagctgttaaggaagctgtaggatactagttaaggcatttgggcccattgctacaggggttgttgtttggcctccaggatcatcattagagatagcagtttgactttatacaagtctgacttgtagcaagcttgcttcctgtgctgtttattatagataagggggttggtttccccagcaggttgctgtagattgtgggtcagagttctgtttttatatatggtctggctgctgttcatatatttagtctctcaaatagaacacccaggtataagaaaatatgaattataggaagcttgcagaatcatggagagctttacaagtatgaagggaacccatctgctattgatgtggagatctgccaatcactcttactgtgtaatgataccttatggcaattgtgggctagagtgggcagtcacatgaataacatgtcacatgaaaaacatagttttattttattttacttatttttttgagacagagtctcgctgtgtcgcccaggttggaatgcagtggcacaatcatggctcactgcaaccttggtcacccaggctcaagcaattctcatgcctcagcctcccaaatagctaggattacaggtgtgcactgccacacccagctaacttttgtatttttagtagagacagggtttcactatgttggccaggctggtctcaaactcctggcctcaagtgatccacctgctttggcctcctaaagtgctgggattacttgtgtgagccactacctctagccttgtctagcacttttatcttatggagatggcttctctccttaaacctcatgaaccaacttctgctggcttcaaacttctgcagctttctcacctgtctcagctttcatataattaaagagagtaaccttgctatgggtgaggctttggcttaagggaagttatggctggtttgatcttctattcagcacactaaaagtttctccatatcagcaataaggctgtttcaccttcctatcatttgtgtgttccctgaagtagcacttgtaattttcttcaggaacttttccgggaaggaacttttccaggccaggcctgatagcttacacctgtaatcccagctctttgggaggccaaggtgggcagatcgcttgagtcagggagttcaagaccagtttgggcaacatggcaaaaccctgtctctaccaaaccaaaccaaacaaacaaaaaagcccagaaaaattaacagggtgtggtggcatgcatctgtggcctcagctgctcaggaggctgaggtgggaggatcacttgagtcagacaggcagaggttgcagtgagccagtatcgtgccattacactccagcctgggtgacagagtaacactctgtctcaaatttaaggccgagtgcagtggctcacgcctgtaatgccagcactttgggaggccaaggtgggaggattgcctgagtccaggagtttgagaccagcctgggcaacatagcgagacctcatctctacaaaaactacaaaaattagccaggtgtggtggcgcaggcctgtggtgccagctacttgggaggctggggtgggaggatcacctgagcccaggaggcggagggtgcagtgagccaagattagggcactgcactccaacctgggcaacagactgagacctgtctcaaaaaaacagaacttttccttcgtatttacaacttggctaattgcttggtgcaaggggcctaggttttggtctgtctcagctttcaacattcctttctcactaagcttaatcatttctacgttttgatttaaagtgagagatgtggggctctttttgtcacttgaatacttagaggtcattgtagggttgttaattggcttagtttcaatattgttgtgtcttagggaatagggaggcctgaggagagggagagagagaggagaacagcatattggcagaacagtcagaacacacacaacatttattgattaagtttgtcttcttatataggcacagttcgttgcacccccaaacaattacaatagtacctcaaagatcactgatcacggatcaccgtaacagatacaataataatgaaaaagtttgaaatattgcaaggattaccaaaatgtgacatagagacatgaagcaaacacatgctgttggaaaaattgcactaatagactcactgtatgtagggttgccacaaagcttcaatgtgtaaaaaatgcaatatctttggagcataataaagtgaagcacaataaaatgaggtattcctgtatatagcttttgccatgatgtcaggtaccattttatgaatttatccctcatgagaactctatgcggtagttgccaacatcatccctattttctttttcttttcttttcttttttttgagacggagtctttttcagtcgcccaggctggagtgcagtgacgcgatcttggcttactgcaagctccgtctcctgggttcacgctattctcctgcctcagtctcctgagtggctgggactacaggtgtccgccaccacgcccggctaattttttttgtatttttttagtagagatggggtttcaccatgttagccaggatggtctcgatctcctgaccttgtgatccacccgcctcagcctcccaaagtgctgggattacaggcgtgagccaccatgcctagcctctttttttttttttttttttttaacgcttttcctgtttggaaggaaaaagtgcagctcgctgccagcagtcatttaattttacataagcatgctctttgaggctgaaacaaatctgactgatttccaatgtgaaaataaaatataaaaactgttcttggagttctttctctctctctctctctttctttctttctctttctttttctttctctctctctctctctctctttctctctctttctttcttttgaggtagagtcccgctcagtcgcccaggctggaatgcagtggtgcaatctcggctcactgcaccctctgcctcccaggctcgagccattctcctgcctcagcctcctgagtagctgggattacaggtgcctgcccacatgcccggctaatttgtgtatttttagtagagatggggtttcaccatgttggccagtctggtcttgaactcctgacctgaggcgacccacccacctcatcctcccaaagtgctgggattacaggtgggagccactgcgcctggcctcttggagttatttctaaacagaactaacattaaagtcattggaataattagaattgtggattaatcaaagaatgatgttaacatcatacataggaattcagcattttctaggatttgacagttttaatgatcagaattactgtattttgtaagtggaagtaccactactgaaaacagaatgctgttaatagaatgatgtcttttgtttccaaagtcagtaatactagagcaatatgaaaataataaaagcaagatatttcacggcaaagttatctctggataaatgctgcagctacaagtgctgccagcaagtattcttggggcaaatgggaaaagggttaaattttaaatttattgttatttttattttttgtagagatgggatctcaccgtgttgtccaggctggtctcgaacttctgggctcaagcaatcagcccacctcgggtatattaagtatattcagaggaacgggccaggccaggtggctcatgcctgtaatcccagcactttgggaggccgagacaggcagataatgaggtcaggagtttgaaacaagcctggccagcatagtgaaaccccatctctactaaaaatacaaaaaaattactagccgggcgtggtggcatgtgcctgtagtcccagctactcgggaggctgaggcaggagaatcgcttgaaccrgggagtcggaggttgcagtgagctgagatggcgccactgtactgcagactggcgacagagtgagactccatttcaaaaaaaaaaaaaaaaaaaaaagtgctctggcatagaggcctttatctcaaatgccactgggaggcagtatcaccattcagtttgtttccctttgtgatttcatacacataggtgcaaaccccttttttccttcagtccttatgctacctggctctaccatcgtttttagtctttttttgtggtatatctatcagcctcaagtttcttgccccatgttgtttgcagacttcgacacttgcctcattgattgcctgtctagtttaagtcctattgttattctgggtgtttttagcatctgaaaggatgatctattctgtaaaggtatggttgattcagtcattcatgaattcattcatttattccacaaatagttaatgaacatatgtgttgggcactgagatgaactgtggggaaaataattaatgacattatttctgcttctgagaaagctatatcatactaggggcaatagacacaaataaaaaagtgtaatgaatgagctgggcatggtggctcatgtctgtaatcctagcattttgataggcagaggcaggtggatcacttgagctcagaagtttgagaccagcctggccaacatggcgaaaccccatctctacaaaaaatacaataattagtgtggcatggttgctcatgcctgtagtcccagggaggctgaggtggattgcttgagcccaggaggttgaggctgcagtgagctgtgattatgccactgtactccagcctggtgatagagcaagaccctgtccccccgccccaaaaaagcgtaatgaagtattataggtgcatttttaacccaactgtctatttgttttgccatgttcttaagacatggataagattagtacagggaacacaggcacaaaagtataaatggcacttttgggaagctgccaatagtttcatatggacagagcccagacttcaagggagggtatagtgagagatggggctaagaggtaagccatggtcagagcattgcctgccaagttaaggagtgtggaagtaaaaattattcatcatctactttatttggttaaaatgaaaataaactattgatcctattaatatttgacaagaagccttgggagttaaaatcctgttgaagtaagtaagttgcttgaaaacttggagtactcctatgttagttattttccttgttaataaaataaagaagagaagattagaaaatatgttacaggaccaacaggtttgtatgcccactgcacagcaacataccaatacactgagacagtagggtttgcagcagagaaagagtttaatgattgcagggcggctgagcaaggagatgagaggagatcttcaagtccatctccctgaggagttctgggctggggtttttaaggggattgtggagaatgagggactggaaaattggggtcattgagtggttggggtcaaagggatgaagtcgtcaggatgtggaaactgcattcagtgagtcagctccttgtatgatccttcagaactgctgatgtcgatggggtccttcagatcagctgacctcattagtttcactggtgtgcaggacctgaaaggatatctcaaatggaaacaacattttataatgttcaagttgttatctataatagagcagttaaggggaactatactgtctgatctatgtgattctaggacaatatgcctaaacaacgatgagaaagcaggtcagagagccggctgacctaatgattaatgctgaatgtgttgcaagcttggtttgttttcatttctttctctccctgctttcctgattaattttcaaaggttcataaggacagtttcaaatatgttctattgacacaggagcataataaacaaaaggagaatggggccaaagtcacatctcagtttaaatatgataagctctgtctcttgttatcataaactactgaaaagtagcagagagttccatcatatttgtttaaatgccagagttttggattgatctcacaggaatgttccctctaacagagcacgtgatgatcacaaagccaataaaacgtgttctgggacgttgcaattgctctttaatctatttggtgcgtttggtataggaaactgagtatttaaaacctaaactgtaaattaacctaccagactttagataagcaatctgccaatataaatattgtgtaggttctcttgttagccataaggctatacatgttttggctctagctttctccttgcagactgcttgaaataaaggattggcagattcacattaaagcacaacattaagccttgttccttcataggaatttggatttgtgtgaagacaatgggaagccatggaagggttttttttttttttttcagagtgtcactctgtcacccaggctggagtgcagtgacgccatctcagctcaagcgatgacccttgggttcaagcgattctcatgcatcagcctccctagtagctggaattacagttatgtgccaccattcccagctaatttttttgtattggtagtagaggtggggttttgccatgttggccaggctggtctcgaactcctgacctcaactgattcacctgccttggcctcccaaagtgctgggattacagatgtgagctaccattcctggctcattgaagggttttaagcagagtagaaacataatcagagttgtgttttgtttgtttgtttgtttatttatgagacagggtctctgtcatccaagctggagtgcagtggcatgatcatggctcactgcagcttcaaccttcccaggctcaggtgatcctcccacctcggcctcccgagtagctgggattatgggcatgtgccaccacacccggctaatttttgtattttgtgtagagacggggttttgcaatattggccaagctggtctcgaactcctaggctcaagtgatcttcccacctcggccttccaaagtgctgggattacaggtgtgagccaccgcccccggcctcagagttgtgttttataaataaactctggagccctgtagagggcaaataggagggtagagagaaaccagaggtggagcaatcctagcagactgttgccagaaaccaggtgagaaatactgatggcctgagctaaggcagtaaagtggagatggaagggatgggatggacataatgactttaaggaggtagaattaatattgattggacatgggggatgaggaaggggtctaggatgattcccaggtttcagacttgggcaactggatggaagggagttgcctggcatctattaagcacttattaaatttgttgaatacatatgcagataggaaataacatgaaaatgaggaggaccagattgcagtgaatcatcatcattttagttttgaatgtgttgagtttgaggtactgttgtgattctccctaagtacgattttactacggggtcgtactgtgactcgtcacatttaatataagacaaaaaatgagcaaaagatttgaataggcatttcaccagagaagacaaacaaatagccaataagcacatgaaaggatgctcaacatcattaatcattagggaaatgcaaatcaaaaccacagtgagatatcaatccataccaactaggatggctaaaataaaaaagataatatggccaggcacggtggctcatgcctgtaatcccagcactttgggaggccgaggtgagtggatcacttgaggtcaggagtttgagaccagcctggtcaacatggcgaaaactcgtctctactaaaaatacaaaaattagctgggtgtggtggcatgcacctgtaatcccagctactcargaggctgaggcaggagaatcacttgaacccaggaggcagaggttgcagtaaggtgagattgcaccactgtcctccagcctgggtgacagagtgagactccctctcaaaaaaaaaaaaaaaaaaaaaaagataataagtgttggtgagcatgtggagaatttggaaccctcatatgaagctggtgagattgtaaaatggtgcagcctctttggaaaacagtttgggaattcctcaaaatgttaaaaatagagttatcatttgacccagcaatttcactcttagggtacatatatccaagagaattgaaggcccatgtccacacaaaaaatctgtatgtaaatattcgtttcagcattattcataataacacaaaaaagcagaaacaacccaaatgtttatcagttgatggatgcataaacaaaacgtggaatagccacacaatggaatatgattcagacattaaaatgaagtactgataaatagatgaaccttgaaaacattatgctaaacagaagaagccagtcacaaaggtcacatattgtgtgattccatttatatgaagtgtccagaataggcaaatccacaaacatggaaagtagattactggttgccaggagtggggtgtgggaggaaagaatgggaggtgactgctaaggagtatggggttcttttgggataataaaagtattctgaaactagatagtgatgattgttgcacaaccttgtgaatatactaaaacccattgaatcgtacacttcaaaagagtgaatggtatgatatgtgaattatgcctcaataaagctgttacttaaaaaaaaaaatatatatatayayatacacacacacacacacacacacacacacacacacacaaccctaggtccagggctcaagctatgaaacagctgcagttctttcagaaaggtgactgagccagccccagcttgcagcagctgatctcaggttggcagtcttaagaagtgggctttgctaaaatcaacctgccctctgaccccattccagcaggggatttgcattgtaatattccagtttaaattagaggatgggaccaggcacggtggtacacgcctgtaatcctagaactttaggaagctgaggcaggcagatcgtttgagcccaggagttcgagaccagtgtgggcaagctggtgaaaccccatctctacaaaaaacaaacaaacaaacaaacaaaaaaactcaaaattagttgggcatggtggcgtgcacctttagtcccagctactctggaggctgaggtgggaggatcacttgagcctgggaggtcgaggctgcagtgagcccagattgtgctactgcactccagcctgagtgacagagggaaaccctgtctcagtaattaaatagagggctgggtgcgtcagctcatgtgtaatcccagcactttgggaagtcaaggcaggtggatcacttgaggccaggagctcgagaccagcctggccaacttggtaaaaccccatctctactaaaaatacaaaaatttttacaggygcctgtaaccccagctactccagaggctgaggcaggagaattgcttgaacccgggaggtggaggttgcagtgagccgagatcatgccactgcactccagcctgggygacagagcgagactctgtctcaaaaaaaaaaaaaaaaaattagaggatgggggctgaggagcatacaagactctctggtcagggcagctcttttctttctttctgtttttcattttggtagtaacagatctgattctgcagctgatcaaggatgacactggtgagaaccctatgagggagtgaagcagcctggactcttaccacaagagggaggtgttataagagcaatgcagaggttggagtgggcagcagttggggcaggaggaagccgactgctgcctggtctgcaaagaagtcctttcaagtctctaggactggactcttcctaagcaagtccggtatgtaggtgggtaagggtggttgtgtgtgtgtgtgtgtgtgtgtgtgtgtgtgtgtgtgtgtgtgtaggggatatgggatatggtctgtttggagacaggttttgattatgattttttatcatcttaaaagatccttcaactttgattcgtgaaagaaattttgtcacgattgcttgctctgcttttttgatctttactcccatgaagtttgggagagtactggttacaagttgggagtgatttcatacttacaaatagggactctgggtatcctctgaaaacgggattctcggcagtgggggaaacaagctctttaatggttaatgctgatagctgttgggtaagtttgtgaaactttgggtaagcggaaaggggccttctgtgattgggccaagatcccagaactctgagaggttgaggagtgaggatcccttgaactcaggagtttgggaccagcctgggcaacatgatgaaaccctgtctctacaaaaaatacaaaaaattagctaggtgtggtggtgcacacctgtggtcccagccacttgggaggctgaggtgggaggatcacctgagcccaggaggtcgaggctacagtgagctgtgattgcaccactgcactccagcctacatgacagagtgagaccgtgtctcaaaaaaaaaaaaaaaaaaaagaagaaagaaaaaaagaaaaaaaaaagaaaatcaaaaagaaaagaaaaaacaattattgacttgaggaatacttagcctgtatgcccaagtgggaagaaaagaatgtcatggtggatcagttcagggagccatgtgctgtttacagacttgctcttaggatcagtgactaagctgactggagtttatagacaaacccatgtctgaagattttaaccaaagaagggaataaaggctacttcttactttgccatgtattatattgcagagagagaggtcctcgcttgagacagaaggaagttaaggtgcacgagcatggcccaaaatagtgataaagagctgatagaaatgattaaggatgttgcaatatgtggagttatgcatactgtagaaaagtggtggtgtaatgcaccagataatgcacattcccatggcacagtttccttctatgaaagctcaggggaagagacagggctcagggagaaaggcaatatggcaataataagacaacaactacccaaaataatactaatatctaacaattatgtannnnnnnnnnnnnnnnnnnnnnnnnnnnnnnnnnnnnnnnnnnnnnnnnnnnnnnnnnnnnnnnnnnnnnnnnnnnnnnnnnnnnnnnnnnnnnnnnnnnnnnnnnnnnnnnnnnnnnnnnnnnnnnnnnnnnnnnnnnnnnnnnnnnnnnnnnnnnnnnnnnnnnnnnnnnnnnnnnnnnnnnnnnnnnnnnnnnnnnnnnnnnnnnnnnnnnnnnnnnnnnnnnnnnnnnnnnnnnnnnnnnnnnnnnnnnnnnnnnnnnnnnnnnnnnnnnnnnnnnnnnnnnnnnnnnnnnnnnnnnnnnnnnnnnnnnnnnnnnnnnnnnnnnnnnnnnnnnnnnnnnnnnnnnnnnnnnnnnnnnnnnnnnnnnnnnnnnnnnnnnnnnnnnnnnnnnnnnnnnnnnnnnnnnnnnnnnnnnnnnnnnnnnnnnnnnnnnnnnnnnnnnnnnnnnnnnnnnnnnnnnnnnnnnnnnnnnnnnnnnnnnnnnnnnnnnnnnnnnnnnnnnnnnnnnnnnnnnnnnnnnnnnnnnnnnnnnnnnnnnnnnnnnnnnnnnnnnnnnnnnnnnnnnnnnnnnnnnnnnnnnnnnnnnnnnnnnnnnnnnnnnnnnnnnnnnnnnnnnnnnnnnnnnnnnnnnnnnnnnnnnnnnnnnnnnnnnnnnnnnnnnnnnnnnnnnnnnnnnnnnnnnnnnnnnnnnnnnnnnnnnnnnnnnnnnnnnnnnnnnnnnnnnnnnnnnnnnnnnnnnnnnnnnnnnnnnnnnnnnnnnnnnnnnnnnnnnnnnnnnnnnnnnnnnnnnnnnnnnnnnnnnnnnnnnnnnnnnnnnnnnnnnnnnnnnnnnnnnnnnnnnnnnnnnnnnnnnnnnnnnnnnnnnnnnnnnnnnnnnnnnnnnnnnnnnnnnnnnnnnnnnnnnnnnnnnnnnnnnnnnnnnnnnnnnnnnnnnnnncggtagtgcaatcatggctcactgcaacctcgacctcccaggctaaagtgattcccaccccctccccccaccgtgtcagcctccagtagtagctgggactacaggcactccccaccatgcctgcctagtttttgtattttttgtagagatgggattttgccatgttgctcaggctggtctcgaactcctcaaggaattcgcctacctcagccttctaaagtattgggattacaagtgtgagccactgtgcccagcctcatgattctatactatccacaaaatcagggttggggcaggaaagctcatgcagagaggttcttggaaagaaagaaaaggaaaggtgtcaggcctctgagcccaagctaagccatcacatcccctgtgacctgcatgtatacatccagatggcctgaagcaactgaagatccacaaaagaagtgaaaatagcctcaactgatgacattccaccactgtgatttgttcctgccccacattaactgagtgattaacttcgtgaaattccttctcctggctcagaagctcccccactgagcaccttatgacccccacccctgcctgcaagagaaaaaccccctttaaatgtaattttccgctacccacccaaatcctataaaatgaccccaccccatctccctttgctgactctcttttcggactcagcccgcctgcacccaggtgaaataaacagccttgttgctcacacaaagcctgtttggtgatctcttcactgggacgcgtgtgacaaaaggtagtcggaatcatccagagtagtcttgttggtatctccatttattagtgctctgtacttgccatgttccaggtctttgctctcactattccctttgcctgaaatgccctggttcccaatctctgcatgtcaaataccatctgtcctccaaggctcagcaaatcatacttccttcattttaaagctctttggttttgatggaacataggcagtgtgagaaagaggagggggagaaaaggtcaagatccaatcatggagggccttgtacaactaaggttttagatttagattttcagtaggttgaatgctattcagggagtgacatcggcagagctgcgctttagggaaattaaccagacagccctatgtggatgagaggggaagtgagagtgacactgtggggttagtgagaaagcttctgtgataggccaatcaagaggcattgaggagtccttgcatttagggtagagaagggagaggaggagctgggaggggtgaaggggaagggacgctgtctgtgactgctgtaggagaacgggagtagagcatctcagaagtgaacggagaagcgtgtgcttcaaattgggtagtcagaaggattaaactatggcttctggctgtgagagacaggagccaaggggcaaacgtaggccatggcctgaccatgaaaaatcagctaatttttgtatttttagtagagatagggcttagtcatgttgcccaggctggtcttgaaagggaaaggcagtgtagtgcagtggttagatgcaaggcttctgcaggtgaacactctggagttgatcctgtctctactattcactctgtttcaccttggaaaagtcacttaattcttgccttaatctgtgcttcagtttcctcatgtgaaaagtgggcataataattgcatacactgccaggcgcggtggctcacgcctgtaatcccagcactttgggaggctgaggtgggaggatcacgaggtcaggagatcgagaccatcctgcctaacacggtgaaactctgtctccactaaaaaataaaaaaaaaaaattagccgggcgtggtggcaggcgcctgtagtcccagctactcgggaggctgaggcaggagaatggcgtgaacctgggaggcagagcttgcagtgagccgagatcgcgctactgcactccagcccggggacagagcgagactccctctcaaaacaaaacaaaacgaaaacaaaaaaaaaacaaaaacaaaataattgcatataccctctattgtgtatatatattatatatatacacatacatatattaatatataacatatatattatattaatatattatatatattatatatatagtgtatatattatatatacacaatagagggtatattatatatacacatatatacacacatatataatatatatgtattatatatatgtatatatatgtgtatatattgtgtatattatgtatatataatatatatgtgtgtatatataatatatatgtgtgtatatatgtgtatatataaaaatatatgtgtgtgtatacgtgtatatatacacgtatatacacatatatatacaatgtatacacacacgtatacaatatacacacacacacatatatatgtgtgaaaccatgtgtgtgtgtgtgtgtatattgtgtatatatatatatggtttcacacagtgcctggcaaggaaagttctctataactgttcactattattatcgtgtgtcaagctgaggagttctgactttatcctgtgggtgacagggagtcacagacagaatccaatgagagcatggcacgatctgaaagcaatcttcttcttcttcactgaaggccaggttaggatctaagaatcagataaaatcataagaaaaaagagtgtgctaaatattgcagtgaggtctgaggagaagagagaggaagccttgggaattgtctgctaataggtccttggtgagctgtgagagagtttccagagagtgatgggaatggaaggtgaagtgcaaggagctcgtgggtggcaagaaaatagagggcctgtgcttgccctttgaatattttggccatatggggaagagagaggatggttattaaaggggtggcaggttaggatggtcttagggaggatgaaaggcagaagaaagaggatagaagacaatacagagaaatttagagcagaggtagcctcactgggccctggaaccccctgagatgacaggcaaaatgttgtgggtaggaattagagtgtccaggttgagcagatctggattttggcagggaagcaacgtgtatgctcatctgtggaaggagagctaggtaaacatgaggttgggaaattttgaaggctagtaaagatttggaacaggtgttgttgcgaaataataagggaggagtcaaatggaggcaaacagaaggtttgccttatattggcggtgggcgggggggagggggcgcagctgagataggataacattgatttgttgtataaaagtttgttttctggtctttctctagcaccacttggcagctggcagctagagaacatggatggtaaaggctttggggtgctagtgaagcacccctaaaatggccaactatgagacctgtgctgaataaggaggcaaatgaaactgtgagaggattgcagtaatagagagagactgaggaaaaggaaggcagagcaggaagaaagaagtagaggggagtggggggaggggaagagccccaaagataggatggggctgtgcagagagggcagtttcagcttttcaaggtttttttttttttttttgaggcagagtctcactctgtcacttaagctggagtgcagtggcgtgatcttggcttactgcaacctctgcctcccaggtttaagcgattcttgtgcctccgcctcccaagtagctgggactacaggcactgccaccacactcagctaatttttgtatttttagtagagatggggcttagtcatgttgcccaggctggtctcgaactcctgacctcaggtgatctgcctgcctcagcttcccaaagtgctgggattacaggcgtgagccaccgtgcctggcctagcttttcaagatctttgtgggagagtagcttcaagcaatgatgaagcccaagatggggatcagacctgaaataaacagtggaagttcttaacctatgcatgtgtgattatgaaggtgttttctaggctygacctcaaaactcattaaataaaattaaccagatagcatagtgtagatgagaaaggaagagactgacaatatgatgtaagaaagctgaattcttatttaccatagcaggaagttaattgagaatgtcaaaaattggtaaatcaagaaatagcagcttaagtactgtgtataaataatttgagtcaaaggcaaaaacgtaaagtaattgcacagcttttgcagatgaatggtttgtaaaagcaagcaggccacgccacttcgggtatttggacatttgaaatattcgaggcacattcaggtttggcctagggtttgggattccgccaggtgtatctcttctgcaggtcttctttgctgctaggcatgcgatggctgaatagtaatgcccggggaaactgtgagggccaagcttctctctaatgggggaaatacgttttcatctttgactggcaacagaaaattaccttttagtcaataaacagtcaggttgaagctctctgtgttactgtagtgcaccagggaatgccacttaggcagaacagaggcagctggctagagaacacagagctctcagattggagagaggcaaagggcttcagagaaggaaggagagagacagagggaagaggggaaaaggagagaaagagaagatggtgggggagggaggagcaatatatgcctctctccactgttttctccctttcactgtctccttccactttacttgcctacaccctaagttgccctctcgctacttactgccttctctcctctccttcccagaccaggcttttgaaaaagagtctccactcggctccacttcctgccctccaattcatgcagcagcccactgaagattggcttctgtgcccttcactgtctgagtcttcccgttaagagcaccagtgccctcctattacccagcagacctcctggttgcattgctgatcctcattaagcccccctttccttggctttcatcagcttgctttttcctacttctctggctcattctccctgctttttttctctcaattttttatcaggatatttttacttagtataacttaatttatctaacatttattaagtatctgctatgtgccattcactgggccaggtgcagactaatatgtaacctgggctctcaagggccttatagtctaaaaatggggaagagcagtgcaatgaagtacagcaggcatcatgataaacccaggccacaatggggacactaaggagggtatagtcaattctgttagaccatggggcaggttaaatcagggcaggaaagtctcttgcctggaccattttttgtcccctctgtctagtactgtatgtaatctctcagtgctcacctatgaaacagtgtggcagccattgaggtgcattgctcagatcactcaagaaaatctgctatgaggagtgaggttgacttccagcctccagttgtggcaccctccgatctgctgtggtatttacactgaggcacgctcctcttgggcactggtcagccaatgaccagaaggatggcagtactggagctggaccagttcagcccagtgtggaacttctccagtggcagtctttgctcaggctcatgggcctggctgagactttcttggggctctactacagtctaaagctcttcctatcttctcctccttctgttcccctctccttcccgaggtgtcagatctgcattaccacctattcctgtgccttccccctttgtcctctgagggtgtttcccccataatctcttgcatgtctaattttgtcttggtatctgaactgacacagaggaataatgatgggacctgtcttgtagggttcttgtgagaattcaaaaagttaatatatgtgacatcttagaacagagcctgatacacagcaagtgctcggcaagggttgcaatttttttttttttttttttttttgagatgggcagaatctcgctctgtcacccaggctggaatgcaatggcatgatctcggctcactgcaacctccacctcccgggttcaagcgattctcctgcctcagcctcccaagtagctgggattacaggcgcccacaatcatgcctggctaatttttgtatttttgtagagatgcggtttcgccatgttgaccaggctgatctcaaactcctgacctcaggtgatctgcctgccttggcctcccaacatgctgagattacaggcatgtgccagtgtgcctggcctagctattattttttaattatccttttgatatggtttggctttgtgtcgctacccaaatcatatcttgaattgtaattcctaggtgtttagggaggaacctggtgggaggtgattggatcatgggggtggtttcccccatgttgagttctcatgagagctgatggttttataagcgtttggtagttcctctcttgcttgcttttgctttcctgccatcatgtgtttgcttccccttctaccatgattgtaattttcctgagacctccccagccatgtggaactgtgaatcaattaaacctcttttctttataaattacccagtctcgggtggtatctttatagctgtgtgaaaacggactagtacacctgtagatctcaacttatattttattctctctaggaagcttctcagacctctctaaactgccttagaagcctctcctgagtgttccagcagcctcctgtttttacttctgttataatgcattgttgtcagtcttcataatgagactgtgaattcaatgaaaaatggactatgtattgttcactcttgtgtatcagtgcctaacactgtgtctgactcaagtagttgttgaattaatgtttgctgaatgaaagtgatgattaggctgagacttaaaagatgagtgttatggctgggtgtggtggctcatgcctgtaatcccagcattttgggaggccaaggtgggtggatcacctgaggtcaggagttcacgactagcctggccaacatggtaaaaaactctctccctactaaaaatacaaaattagcccggcttggtggcacgtgcctgtaatcccagctactcgggaggctgaggcaaggagaatcacttgaacccaggaggcggaggttgcagtgagctgagattgcgccattgcactccagcctgggcaaaaagagtgaaactctgtctcaaaaaaaaaaaaaaaagaaaaaaaaagagtgttatttgccaagtagatgagggctacttctttccagtagaaagaagtgtatgcagaggcgtaaaaagcctgtgctttgcaggggactgaaagttgtttgttttggctaaagagtaggatgcaagagagaagcctaagtagccagagtgctggggacattcatgtcaaactaaggagtttgaattgcatagactagcctcatgcaggcgttgtggtataggccttatgatgctagcgggcccatacccatatttgacctctacctatgttgttatgaattatgttagttcagccaacatgtatagattactaaaaaatggtggactttgctccagaatttcatatagaaacataggcatctgtgaacactcatttcaacaatgcttytgattggtctaggtttacaaattgctttggctgcaataactcacccaaactattggatctcctaatggatctcactgccttcaccacacctgtttcatctatcctccactgccattgtgagacaaatcttcctaaaacttaatctggccacctgactctagtagcatactctgtttaatgtcttctagtagcatactctgtccacaggataacatccagattccgtagtgtggcttacaaggcctttcatgatttggcccttcactacctcatctccagtctcttcttatgtatgttctgctctgcactcatgcagaattgtttataggtctcaagaagttctgtgctgctcacgactcccttcatgtacacattgttactgcctggaatgttgtcatccttatccactttttgaacttacttatcctatttggtaggaagtagtaccaaaatcattccttctgtgctaggctatcggtcatcttcctttgtagactgtgtgtatacttctgttatggcacctttcacactgcattggatttgtttggttacctcactgacttccctctctagactgtggccccttgagrgtaggactaagtattaatcartaaagagtccctatcacctagtgcaatgcctggcacatggcaaatactgaatagatatattggttaaataataaggaaggaataaaatgttttctttctattgaaagagaaggaagcaccctcactatgtggctctacctggcggccttcgtgggcctgtactaccttctgcactggtaccgggagaggcaggtggtgagccacctccaagacaagtatgtctttatcacgggctgtgactcgggctttgggaacctgctggccagacagctggatgcacgaggcttgagagtgctggctgcgtgtctgacggagaagggggccgagcagctgaggggccagacgtctgacaggctggagacggtgaccctggatgttaccaagatggagagcatcgctgcagctactcagtgggtgaaggagcatgtgggggacagaggtatgaaatattttctccttttatttacttagcatgaagatgctaaggttatatatacagttgttccttggtgtctcctggggattggttcaaggactgcttgtggatactaaaatccgaggatgctcaaatcccttatataaaatagtgcagtatttggttataacctatgcacatcctttaaggtatggatactttaaatcatgcctgggttacataaaatactaaatactttgtaaatgatatgtaaatagtagttatactgtattgtttagggcagccgtccccagcctttttggcaccagggaccggttttgtggaagacagtttttccatggacagggagtggggatggttttgggatgattcaagtgcattgcatttattgtgcacttcattatattattacattgtaatatataatgaaataattatacaactcaccatgatgtagaatcagttggagccctgagcttgttttcctgtatctacatggtcccatctgggggtgataagagacagtgacagatcatcaggcattagattctcaacaggagtgcataggatatatccctggcatgtgcagttcacaatagggttagtgctcctgtgagaatctactgctgccactgacctgacaggaggcggagctcaggcagyaatgcctgtgatggggagtggctgtaaatacagatgaagctttgcttgcttgtctgctgctcacctcctgctgtgtggcctggtttctaacaggccatgggctggtaccagtctatggcccaggcactggagacccctggtttagggaataatgacaaggaaaaaagtctgtatatgttcagtacagatgcaaattaaaaattgtgttttctatccacaattgattgaatccatggatatgaagggctgactgtgtgtatcaaagctgagcttagaaggctggcctcgtcatttgaaggactgttgaggtcttttgtggcgtttcatttccttaacaatgtttattttgttgttgaaaaataagctcaatagatttgaagctattatctcatattggaagtagagtatttataaacataattctttatatttgaggagttggggtacagtggcatgatcatagctcactgcagccttgatctcctgggctcaagcaatcttcctgcctcaccctttcaattagctgggattagaagcggttgccaccaygcctggctaatttttttttatttttatttttagcagaaacacggtcttggtatattgcccaggctaagatgttcttaagaatctgattatcttggctgctacttaaaatataggcatttcttgaagtcaatctttggtcttctttaaaaaatgttttaaaatttcattatatttaaaaatcaacacactatttcttagagaaattttaggtttatagaaaattgaacagaaagtacagagttcctatataccccctcaacaattttcccttttttttttgagacagagttgttacaattgatgaaccaatgttgatatgttatcgttaactaaagtccatagtttacattagggttcactttgtattatatagttctgtgggtttgaacaaatgtgtaatgacaagtagccaccattattgtatcacacagaatagtttcagttccctaaaagtccctcgtgctttacatattcatcactccccacattcctggcaaccactgctctttttactgtctccatagtttttccatttccagatgtcatatagttggaatcatatttttttgagacagaatttcactcttgtcacacaggttggagtgcaatggcataatctcggctcactgcaacctccacctcccggcttcaagcgattcgcctttctcagcctcccaagtagctggcactacaagcatgcaccaccataccgggctaatttttatatttttagtagagatgggttttcaccatgttggccaggcttgcctcgaactcctgacctcaggtgatctgcccgccttggccttccaaaatgttaggattacaggcgtgagccatcgcgcccggctggaataatgttatatgtagtcttttagactggcttctttcacttagcagtatgcatttaagattccttcatgtcttgccttttttttttttttttttgagacaggatcttgctctgttgcccaggcctgagtgcagtggaatgatcatggcccactgcagcctcactctccttggttcaagcgatcctcccacctcagcctcccaagtagctggagtacaggtacacaccaccatgcctggctaattaaaaattttttttcttttagagacgtcatctcaccatgtcacccaggctggtcttgaactcctgggctcaactgatcctccaaccttggcttcccagtgttgggattacaggcatgagccaccacacctgttctccatgtcttttcatggcttcatagctcatttctgtttttttgtttgtttgttttgttttgttgagatggaggtcttactctgttgcccaggttgaagtgcagcggtgcaataatagctcactgcagcactgaacttctgggctcaagtgatcctcttgcctcagcctcccaaaatgctggaattacaggtatgagctactgcgtcaagcctgacagctcatttctttttctcgctgcatagtattccattgtatgtatgtaccacagtttatcattcacctattgaaggacatcttggttgttttcagtttttggcaattatgaataaattctctttttaagttctattttgtctagatattattcaactcctctttgattaccttcttctccttctcccttggttttatgattcagtagattctggtaattggatctcctaaataactcctcactctaggagttgcaaagtagcaatgaaattgcttcttttggctgggtgtagtggctacacatctgtagttccagctacttgagaggctgaggtgggaacattgcttgagcaggagtttgaggctacagtgggctacgatagcacttgtgaatagccactagagtagctgggactacaggggtgcaccaccatgcctggctaatttttgtattttttgtagacatgaggtttctccatgttgcccatgttggtctcagactcctgggctcaagccaaccacttgccttggccttccaaagtgtaaatttttttttttttttggaaatggagttttgctcttgttgccccggctggcgtgcaacggcatgatctccgctcactgcaaactccgcctcccaggttcaagcgattctcctgcctcagcctcccaagtagctgggattacaggcgcccgccaccataccctgctaattttgtatttttagtagagctgggtttctccatgttggtcagactggtctcgaactcctgacctcaggtgatccgcctgtcttggcctcccaaagtgctgggattacaggcgtgaggcactgcacctggcccaaagtgtaaattttttaaaaaacaatttactttaaacttgaaaatttactgatttgactaaaaaaattttgaaaatctaaaatgtattttaaaatattacttccttccagcactttgggaggccggggtgggaggattgcttgagcccaggagttcaacaccagcctgggcaacacagtgagataccatctcaatttaaaaaaataataaaatattgcttcttgtctgaggatgttcttaactcccccaggcagagtcagaagttatgggtagttatagtctctttgctgtgcatacccgtttatttctattgtattgttattgttttcccatctgttagactgtgagctccttgaagatatgggcctctcttactcatttttatatttccaacttctggcaccttgcctggtacatgttaagggctcaataaatgctgaatgaatcctctatactcatacttttgtctattaccctttttatctgtgcccttggtttcttactcctcacatttgaatttccaactacttgccgcatttctccatctggaaattctactagtgcctgaaactcacaaaatctaaaggagtctttgttttcctctcacctcttcaccaattcttttttgttttttctttcttggagatagagtcttgctgtgtcacccaggctggagtgcagtggcgcgatctcagctcactgcagcctctgcttcccgagttccagcgattctgctgcctcagcctcctaggtagctgggattacaggcacacaccaccatgcccgtctaatttttgtatttttagtagagacggggtttcaccatgttggccaggctggtgacctcaggtgatccgcccgcctcggcctcccaaagtgctgggattacaggcatgagccactgcgcccggcctttcttcaccaattctacttttctttctagtccttctctcagtttataatgttactatcccttcagttacaaagactttttaccttggagtctttttcttttttttttttttttttgagacggagtctcactcagtcgcccaggctggagtgcagtggcgcaatctcggctcacggcaagctccgcctactgggttcacgccattctcctgcctcagccttacaagtagctgggtctacaggcgtccgccatcaggcccggctaatttttttgtatttttagtggagacggggtttcaccgtgtttgccaggatgctctcgatttcctgacctcgggatccgctcgtcttggcctgccgaagtgctgggattacacgcgtgagccaccgcgcccggccaccttggagtcttttttaatccttatactttcaacttttctgtgtctctgtattttatgtgagcctcttgtaagtagcatatagctgatataaaaactaatccaatctgacaattttttttttagtagaacatttctttcatctatactactttattattattattttatttttttttagaggcaaagtctcactctgtcatccaggttggagtgtagtgccacgatcagctcactgtaatgtcgaattcctggactcaagccatcctcccacctcagcctcctgagtatctaggatttcaggtgtgcaccaccacacttagctaacttaaaataaaaaagttttgtagagtgggtctcactgcattgcccaggctggtctcaaactcctggtctcaagtgatcttaatgcctcagcttcccaaagtgttgggattacaggcatgagccactgagcctggccttaattattatgtttggatttatttctttcatcttattttgtgctttttatttgtcccattttttcctgtttcctttatgctcttttgaattgattgaatttttattccactttttccactactaaattgaaagtactataatattctctatttctgtttccctagtagaaattttaagtgcatatgtggtttatcaaatgtaaaattaacatctttacctttctcctgagtaatccaaggccctcagaacactcacatttcagtcatccttcctgacatacatgctcttgctgctgtgtatttcagttctgttttttggctctccaatatgcaatgtttgtttagatttatcctctttttacctttttttttttttttgctcattattccttcttgaattttccatctaaaattgctttcttcgttaccgaatatatgcctaagaattatagaagatgctggggcaaaatcttttttttaaaaaaaaatttattaaaatgtctaattaccctcattcttgaaagataattttgcagataggctagtctatgttaataattactttctcttggcacattgaagacaccattccagtcttctgtctcctgttgttcatgtcttgataagtcagttgttagcctaattgtttttcctttgaaaataatctgtctttcctttctggctatttaaggatattctcttctttgattttattttttctttgatctttattttggtgtgtttaggtatggatttctctgtttatactgcttgggatttattttttggggggtgtaaaaagtaaagtggaggttcctcctcaaagactttcctccccatctgattgggaataaatagtgacttctcttaaaaacataatttattcaaagacctgtactaacattcttaaatatctgctagctgtaataaagaaatcaatgtactttatgttcttagctcccacaatttaacctaaatatttgccctggcgtgcttatactggtccaaacaagcattaggtcatagcctgttcctcttccttatttgaaggtgtttttacctttttcaacattccacaagttacttcctccttcctttgttctcctctgcctttgcctcttttaaaaagttctaagtgaggccgggtgcgtggctcacatctgtaatcccagcactttgggaggccgaggcgggcagatcacgaggtcaggagatcgagaccatcctggcgaacacggtgaaacccccgtctctactaaaaataccaaaaaaattagccgggcgtctgtagtcccagctactcaggaggctaaggcaggagaatggggtgaacccggggggtggagcttgcagtgagtggagatcccgccactgcactccagcctgggcgagactccgtctcaaaaaaaaaaaaaaaaaaaaaaaattctaagttgctagccaatcgagacaaatataaaatgtgaggtcctgctgcagtcagtaaaaaccagacacaacaataaaatagacatgtcaggttataaatgaccctgtctcctttgttcagtatactctcatggcaaatctgctggcaagtataccctttccgcaaaaagtgaaaaaaatggccttactaaaaaaattaaatttatgttcaagtgctatttctttacgacaccaaaaagcaaacatttcaaacaggggggcttctttaatctgttcattatcagttctggaaaattcttagccatcattacttcaaatactgcctttattccatttccctcccttatttctggatcttattagacatatgttacatgtttttactttggtcttgcttcccttttctttcatgtttttaatctctttatatttgtgccatagtctgtatatttttctttactgtcttccagtttgctactttctttcttccactatgtctatctactattaaacctgtctaacaaattttaaaatttcaatagttgtatcttttatttctgaagttttatttggttctttctcaaatctgcttgatcaattttatagtattttaatgaatattttcaatccttttatttaaaaattatatttagcaggctgggcgtggtggctcacgcctgtaatcccagtactttgggaggctgaggcgggtggatcacgaggtcaagagatggagaccatcctagccaacatggtgaaaccccatctctactaaaaatacaaacattggctgggtgtggtggtgcgtgcctgtagtcccagctacttgggaggctgagggcaggagaattgcttgaacccgggaggcagagtttgcagtgagctgagatcgtgccactgcactccagcctggcgatagggcgagactttgtctcaaaaaaaaagttatatttagcaaacttgtatgttatatcatttgggctgcaaactctcatgggggtggttagtggttatgattcctcaagagtgattctttccccaccaaagttcaaaatagagtatttttgcctgaaaccaaactcctgatatgacttttaattgttttaggactctggggactggtgaacaatgcaggcattcttacaccaattaccttatgtgagtggctgaacactgaggactctatgaatatgctcaaagtgaacctcattggtgtgatccaggtgaccttgagcatgcttcctttggtgaggagagcacggggaagaattgtcaatgtctccagcattctgggaagagttgctttctttgtaggaggctactgtgtctccaagtatggagtggaagccttttcagatattctgaggtaacttaagttaaaacaaaaacagctattgagcactgaaatatgtcttaggcattgtgctagttgctttcgsctatcttatttcatcactcctcaaatcttgatacatagatattattactagtctattttatatagctaacaggctcaaattttctyatctgtcccaragttcacctaccatagccagaatttggccgaactgtgttttgacccaggtctttgtcttctaccactatgtcacacttcaattctcaatatttattttttatttttgagacagggtctcactctgttgctcaagctggagtgcaattgtgtgatcatcatggttcattgcagcctcaacctcctgggctcaaacgatccttccacctcaacttccctggtagctgggactatgggtgcacgctgccatgcccagctaattttttttttttttttttttattgatcattcttgggtgtttctcgcagagggggatttggcagggtcataggacactagtggggggaaggtcagcagacaaacaagtgaacaaaggtctctggttttcctaggcagagtgtttgtgtccctgggtacttgagattagggagtggtgatgactcttaacgagcatgctgccttcaagcatctgtttaacaaagcacatcttgcaccgcccttaatccatttaaccctgagtggacacagcacatgtttcagagagcacagggttggggttaaggtcacagatcaacaggatcccaaggcagaagaatttttcttagtacagaacaaaatgaaaagtctcccatgtctacttctttctacacagacacggcaaccatccgatttctcaatcttttccccaccttgcccccttttctattccacaaaaccgccatcgtcatcatggcccgttctcaatgagctgttgggtacacctcccagacggggtggtggccgggcagaggggctcctcacttcccagtaggggcggccgggcagaggcgcccctcacctcccggacggggtggccgggcggggggctgacccccccacctccctcccggacggggcggctggccaggcggggggctgagccccccacctccctcccggacggggcggctggccgggcagggggctgagccccccacctccctcccggacggggcggctggccgggcagaggggctcctcacttcccagtaggggcggccgggcagaggtgcccctcacctcccggatggggcagctggccgggcggggagctgagccccccacctccctcccggatggggcggccggccgggcgggggggctgaaccccccccacctccctcccggacaggacggctggccgggcgggggctgacccccccacctccctcccggacggagcggctggccgggtggggggctgaccccccccacctccctctcggacgggacggctggccgggcggggggctgacccccctcacctccctcccggacgggacggctggccgggcagaggggctcctcacttcccagtaggggcggccgggcagaggcacccctcacctcccggacggggcggctggccgggcgggggctgacccccacctccctcccggagggggtggctgccgggcggagacgctcctcacttcccagacggggtggcagccaggtggaggggctcctcacttctcaaacggggcggttgccaggcggagggtctcctcacttctcagacggggcagccgggcagagatgctcctcacctcccagacggggtcgcggctgggccgaggcgctcctcacatcccagacggggtggcggggcagaggcgctccccacatctcagacgatgggcagccgggcagagacgctcctcacttcctagatgggatggcggccgggaagaggtgctcctcacttcctagatgggatggcggctgggcagagacgctcctcactttccagactgggcagccaggcagaggggctcctcacatcccagatgatgggtggccaggcagagacgctcctcacttcccagacggggtggcagccgggcagaggctgcaatctcggcattttgggaggccaaggcaggcggctgggaggtggaggttgtagcgagccgagatcacgccactgcactccagcctgggcaccattgagcactgagtgaacgagactccgtctgcaatcccggcaccttgggaggccgaggctggcggatcactggcggttaggagctggagaccggcccggccaacacagtgaaaccccgtctccaccaaaaaaatacgaaaaccagtcaggcatggtggygcatgcctgcaatcgcaggcacttggcaggctgaggcaggagaatcaggcagggaggttgcagtgagccgagatggcagcagtacagtccagcttccgctcggcatcagagggagaccatggaaagagagggagagggagaccgtggggagagggagacgagggagagggagagggagagggagatttctttattctttaaaatattcagtaaaggtattttataatcttttttgttttgcttttccttcctgaaagcattgaaatggtggtggtctttaatcataacttgtggggttttatttcaggcgtgagattcaacattttggggtgaaaatcagcatagttgaacctggctacttcagaacgggaatgacaaacatgacacagtccttagagcgaatgaagcaaagttggaaagaagcccccaagcatattaaggagacctatggacagcagtattttgatgcccgtaagcttttttcttttgatagggataatgggtaccctgtattagtccattctcatgctgctatgaagaaataactgagactgggtaatttataaagaaaagaggtttaattgactcacagttctgcatggctggggagtcctcaggaaacttataatcatggcagaaggcacctcttcacaggatggcaggagagggaatgagtgcaagcagaggaaagccccttatgaaaccatcagatcttgtgagaactcactactaaaagaacagcatatgggaaccacccccatgattcagtacctcccaccaggtccctcccacgacatgtggagattatgggactataattcaagatgagttgggtggggacacaaagccaaaccatatcagtacccttgcatgagaaggggaaaagagggttggtggacaatgattggcagatcctctcaggacaaagctccttaaataaagcattcccagaacagaaggaagtcaggaaggtcccagtggtctcatggttggcttggtctgatgactatcatggttgaggagggggacatataggcggcctggggccaggctcttccctgccttgtcctctgtgggccagggcacctgagcactaggaggtattacatacttagaggcatggacccttgagagggtgtgccccttggtagcattgcagggctggtgtgagatgtctgctcaactaaagtgcagtcttcatcattgtttaccttttgataacaaagggcttgtccacaaactatgtgtcttaatgtgacaggagaaagcatgtaggtgggaagaggtaagtcagtgaggataagtctttgcagagccctatgggccattccctgaggctatatttctcttgttcaggtgataggagctttgtgggagtgggatttgtcaatttcctataagaatattattctgaagacctggaggaggaggtagcagcagcggtgaaaaatgggaatgacttctaataggtacagggtttctttttgggatgatgaaaatgttctaaatgtagattgtgatgatgattgcacaactctgaatatactaaaaattattgatttgtacactttaaatggctgaattttatgatatatgaatatctcaataatgttaaaaaaatttccagttgaaaaagtatattcccatatctgtgttgttctaaacctatttaaaaatcctctagtaacagaattaagttgtgtgtttttttttttttttttgagacagagtctcgctctgtcacccaggctggagtgcagtggcgtgatcttggctcactgcaacctctgcctcccgggttcaagcaattctcttgtctcagcttcctgagtaactgggactacaggcatgcaccaccaagcctggctaatttttgtatttttagtagacatggggtttcaccatgttggccatgccggtctcgaactcctgaccccaaattatccacccacctcggcctcccaaagtgctgggattacaggcatgagccactgcacccagccatcagaattgagttttgaggccaggcgtggtgcctcacacctataattccagcactttgggaggctgatgtgggaggatcgcttgagcccaggaattcaagaccagcctgggcaacatagtgagaccttgtgtctacaaaaaataaacaaaattagctgggcatggggatgcgaacctgtagtcccagctatgtgggaagctgaggagggaggatcacgagcctgggaggcagaggttgcagtgagctgagattgtaccactacactccaacctgggtgacagagcaagaccctgtctcaaaagaaaccccaaaaaacaaccaaacaaaaaaagaaaaatgattgagttttaaaattaaaattaaataaaatccaaaatttagtttttattccagtgcattagctattgtttaagtgctcaatagctacatgtggctagtggctatcatattgggatgcacattctagatcattctattttgtagaaattagatgtggtgagacttctgtgactgcatgatcttaaaaatataaggaataagattgttgaccaccatttctttttttgtatacagtttacaatatcatgaaggaagggctgttgaattgtagcacaaacctgaacctggtcactgactgcatggaacatgctctgacatcggtgcatccgcgaactcgatattcagctggctgggatgctaaatttttcttcatccctctatcttatttacctacatcactggcagactacattttgactagatcttggcccaaaccagcccaggcagtctaaagaaaactgggttggtgcttcttggaatgaaggcaaaaatctgaaattgttagtgtctcagtaatcctgatttagaacccaggctttttgtaacaatgtgttttcttgcctaaattcatttatctggcatcatcagagtactaacatgtttatatttcagatatccaaagcttaccactttaggtgatgaatctttactattttagcccttttttgatgagactatttgtctaaagtgaatcatttgttcttgccttattaaacagagtagatggaaaacaatttaacctattttgaagtcatttctttatgaatatgaataattgttctatgctttaataatctattgtgaggaaactactaagaaatatgttggtgtgtttgtccttacttgaaatgggtctgtattatggtacttttaataaatatttgatttttctttctcttctctttttgtcagcagtcttttttccccaatatatttcttccttttttaaaaagaaattactttttaaattttaaatcaaaataatgttatacatatatagctaaaaattcaattaatattcaaaagcttaaaatgaaaaatggcaatccttgcccttatcctcatccttcattgctgctcgtcagaggcaaatggtctcaacttttagctatttcttctggtatttatctctgaacttctaaatgatatactgttattttttattaattttagctattctcaattgactttctgttatggtgcaaatttggcttttttttacatcactttcctgcccatttcctttatccttatagtttgaatataattttatcacatttctggttaaatgaatagtgtttatataattaagtatgtgaatattattaactatttaatcaagtatttttcttttatagtaacattttttgtttttcttggagttaattattgccttgcttttttgcttgcaaaggtttttatttaccttaacctttttttggttgttctctcagatctgtcactaccagtagtgttctctaaataattaaatagattatagacttattcagtctatttcaaccccccaaccctcctgtccctggagatttccctctcactgctttctttttttttttttttctaattgatcattcttgggtgtttctcgcagatggggatttggcagggtcataggacaatagtggagggaaggtcagcagataaacaagtgaacaaaggtctctggttttcctaggcagaggaccctgcggccttctgcagtgtttgtgtccctgggtacttgagattagggagtggtgatgactcttaacgagcatgctgccttcaagcatctgtttaacaaagcacatcttgcaccgcccttaatccatttaaccctgagtggacacagcacatgtttcagagagcacagggttgggggtaaggtcatagatcaacaggatcccaaggcagaagaatttttcttagtacagaacaaaatgaaaagtctcccatgtctacttctttctacacagacacggcaaccatccgatttctcaatcttttccccaccttgccnnnnnnnnnnnnnnnnnnnnnnnnnnnnnnnnnnnnnnnnnnnnnnnnnnnnnnnnnnnnnnnnnnnnnnnnnnnnnnnnnnnnnnnnnnnnnnnnnnnnnnnnnnnnnnnnnnnnnnnnnnnnnnnnnnnnnnnnnnnnnnnnnnnnnnnnnnnnnnnnnnnnnnnnnnnnnnnnnnnnnnnnnnnnnnnnnnnnnnnnnnnnnnnnnnnnnnnnnnnnnnnnnnnnnnnnnnnnnnnnnnnnnnnnnnnnnnnnnnnnnnnnnnnnnnnnnnnnnnnnnnnnnnnnnnnnnnnnnnnnnnnnnnnnnnnnnnnnnnnnnnnnnnnnnnnnnnnnnnnnnnnnnnnnnnnnnnnnnnnnnnnnnnnnnnnnnnnnnnnnnnnnnnnnnnnnnnnnnnnnnnnnnnnnnnnnnnnnnnnnnnnnnnnnnnnnnnnnnnnnnnnnnnnnnnnnnnnnnnnnnnnnnnnnnnnnnnnnnnnnnnnnnnnnnnnnnnnnnnnnnnnnnnnnnnnnnnnnnnnnnnnnnnnnnnnnnnnnnnnnnnnnnnnnnnnnnnnnnnnnnnnnnnnnnnnnnnnnnnnnnnnnnnnnnnnnnnnnnnnnnnnnnnnnnnnnnnnnnnnnnnnnnnnnnnnnnnnnnnnnnnnnnnnnnnnnnnnnnnnnnnnnnnnnnnnnnnnnnnnnnnnnnnnngcggctgccgggcggaggggctcctcacttctcagacggggcggccgggcagagacgctcctcacctcccagacagggtcgctgccgggcagaggtgctcctcacatcccagacggggcggcggggcagaggtgctccccacatctcagacgatgggcggcagggcagagacgctcctcacttcctagatgggatggcggccgggaagaggcgcacctcactttccagactgggcagccaggcagaggggctcctcacatcccagacgatgggcggccaggcagagacgctcctcacttcccagacggggtggcggccaggcagaggctgcaatctcggcactttgggaggccaaggcaggcggctgggaggtggaggttgtagcgagccgagatcacgccactgaactccagcctgggcatcattgagcactgagtgaacgagactccgtctgcaatcccggcaccttgggaggccgaggctggcggatcactcgcggttaggacctggagaccagcccggccaacacagcgaaaccccatctccaccaaaaaaatatgaaaagcagtcaggcgtggcggcgcccgcctgcaatcgcaggcacttggcaggctgaggcaggagaatcaggcagggaggttgcagtgagccaagatggcagcagtacagtccagcttcagcttggcatcagagggagaccatggaaagagagggagagggagactgtgggaagggagagggagagggagagggagagggagaggtctcactgctttctcctcctgtttctgtatgggctggttgttctctggttctgctactcaattatttttctaggacttccctacatctctttcctgctgtctgaaatcctgcttcctggagcatatggcctcttggttttctcctttattttaacagaactcattcttactagctaagtctttgcatgtttaaaaaggtctctgttggccgggcgcggtggctcacagctgtaatcccagcactttgggaggctgaggagggcggatcacgaggtcaggagatcgagaccatcctggctaacacagtgaaacccccgtctctactaaaaatacaaaaagttagccgggtgtggtggcaggcgcctgtagtcccagctgcttgggaggctgaggcaggagaatggcgtgaacccgggaggtggagattgcagtgagccaagatcgcgccgcggcactccagcctgggcgacagagtgagactctgtctcaaaaaaaaaaaaaaaagatctctgttggccaggcgtgctctgttggccagtcatggtggctcacgcctgtaatcccagcactttgggaggccaagctgggtggatcacctgcagttaggagttcgagaccagcctgaccaacatggtgaaacctcatcttactaaaaatacaaaaattagctgggtgtagtggtgggcacctgaaatccagctactctggaggctgaggcaggagaatcgcttgagcccgggaggtggaggttgcagtgagccgagatcgcaccactgcactccaggctgagtgagagggtgagactccgtctcaaaaaaaaaaaaaaaagagaaaaggtctctgttcttataatagattagctgagcatggacttctagggttgaaaataattttctttcaggattttaaagacattgcttcactttcttatcgtatccattaagaaccttaatgccattctgattcttgttcctttgttcctttttgtccctattctatggaaggttttaggctctatttagaagataagtacataaatgtttattttatttggaatctttatcttttattgcaggtgttccaaaacttcacaatgatggacataggggtagctcttctattcagttattgtactgggtacttagtacaagtcatgatgtaggagagagattggagaattgctaaaatgatggcaaggaggttgagagaggattcagtttggtgcataagtgggagaacgggcttcaaatagcatgacttaagtaagagtttgttttcttaggccaggcacggtggctcacgcctgtaatctaccactttgggatgctgaggtgggggtggattacctgtggtcaggagtttgagaccagcttggccaacatggcaaaccctgtctctactaaaaatacgaaaattggccaggtgcggtggctcactcctgtaatcccagcactttgggaggccgaggtgggcggatcactaggtcaggagttcgagaacagtatggccaacaaggtgaaaccccgtctccactaaaactacaaaaattaaccaggcatggtggcaggnnnnnnnnnnnnnnnnnnnnnnnnnnnnnnnnnnnnnnnnnnnnnnnnnnnnnnnnnnnnnnnnnnnnnnnnnnnnnnnnnnnnnnnnnnnnnnnnnnnnnnnnnnnnnnnnnnnnnnnnnnnnnnnnnnnnnntaactcatctctgtcggattaaactctatgtgcatcttctggccttttcttccagcttgtcacttcaaggttgtaagatggttgctgcggatccagtacatcactttcaagtgacaccatataagtcaacctaaataacaaagggaggctctctgaaagaaaaagacatttatttgggaatagagtattgcaatgagaatatacccgtcatagtaaactacgtgcatattcagggaggtaaaggaagacaaaggtttttaaagaaaagagggaaattgcacaattgttttaaaataattatatttggctacaaagatcaataacaaggatgatgtcagtccaggttggacaggcagttctggggcagatgttcttgcagtgttttttatggaaatttctggtggcttctgtgcaaggatatgatttttccagagtcttttttgtgaggcatacaagcataaagaaccttctcttcatggccttctatggcttgatttgtcagggctcttctttctttaaacattagtgactccattttgattctggcaactttcacacaaaagagaatgatggtataagggagaatggtggtgatgtctgcatctatcatcttctatgaggagaacaaaagatttctcagaaatccccacagcagactttcccctatatgggtgacctctatatgggttacttttgagagtgaaaggaggcacttttatttatttattttttgagtcagagtcttgctctgttacccaggctggagtgcagtggcgcaatctcggctcgctgcaacctccatctcttgggttcacgtgattcctgtgcctcagcctcctgagtatctgggatcacaggcgtgtgccaccatgcccggctaatttttgtatttttcatagagacaaggtttcaccatgttggccaggctggtctcaaactcctgacctcaagtgatccatccgcctcaaactcccaaagtgctgggattacaggtgtgagccaccgtgcctggccaggaggcactattaatcatttacacggaaccctgattttatctttacacattatatgaatgtatcaagttatccccaaaataagtacatctattatgtatgaacacaaaaaattaaaaaaaatttacacagggataacaaatataaatgagtactgtcctaggtaaatcgagatatctggtcaccctgctttgatgtaataccattatctaatctttagttcttatataaattctgccagttgtttgaaaaatgttctatatagcaattaaattttttccccaggatcaaatgcagcatcttactttgcattcaattgtcatgttcctgttctcacttaattttgaatagtttaatttctttttcacaattctgtctttcacatttctgacatttttaaagagtgtgggccagttattttgtaaagcgaccccaagttggattgtatgctgtgtcctcatgattagatccaggatatgcattttggcagaaatgccacagaagtgatattgtgtccctctcactgcatcacgtcagtagcatagatgtgtttatctcattattggtgttaattgtgaatccttgcttagagtctgccatgcttctccactgcaaagttaacattttttcctttgtaattaatgagtaatttgtgaggctattttgagattgtataaatgtcctgttcctcatcaaactttaacaagtaatttttag

SEQ ID NO: 97415 - DNA, 87364 bp, Homo sapiens
tgggaagaatagaaggggagaggagaaaaatggggattgttaatggctagaaaaatatggttagatacagtgaataagacccagtatttgatatcacaacagggtgactacaatcagcaataatatgttgcacattttagaataactgagggagtacgattggaatgtttgtaacaccaggaaatgatgaatgcttgagatgatggaaaccccatttaccctgatataattattacacattgtacgactgtttaaaataactcatgtaccccatatatatgtacccatgaaaatttacaattaaaaaaactttaaacgtcaaatatatgtagcagacaattgccatttgttccccaagatcaatgttccctttttttacactagtagagccctaaattttagctggacacatgatgacccaaaatacagactacatttccccacctcccactagccaggtgtggctatgagactaaggtctagccggtaggattgtcttctcttcctattcttactggctggaatgcagacaccataactagagatggggtggccatcttgggtcatggagtgagtgtaagaaagtgggccatgcatgggagagcaaggcagcaggggcctggctcctaaggaccccatggagtattgcaatcaactagccctgcattcgtatgtctggattttcacataggagagaaatatacttccatcttgtttcagccactattaatttaggtcttggtcacttacaacaaatttgtatttccaacatggagattgagggctataaacctgagagctggaatgtgttgtgaaaagcagttaggataagggattccgaactgggacagaagtggttggggtaacctaacaaaatgtaagagtggaagagcagaagaaactggatggaaagagaagatgttatgataggaaaagaaataatgattgtgggggatttggggaggataaacttagggtggaataagaaattaagtcttgaaatagaatttagtatcctgattaagacaattcttcatcactaacagcttttatctggcccagttagataatctacccagtgtgcagtgaatctggtggtggaaaggaccggcaggattagaaattgacccttgaatgggaaagaacaaagagaatgctcttatgcaaagagttaatgactgacactgctttaagagaggttgttttaacaaagtcaaacctaagaaataaatctctaacattctccgtctgtgcaggaggtgaattttgagggcactaggtcctcttcctgaccccactaatcccatgcttatctacctttcaacagtgtggttctctcattcatctgtggatgtacctatgtttgaacaaaggcttatgttcctttgttgaggacataatgagggcagttattgaaggaaaccaacaaaaagcattcccccaaaagtgtttttttaaggtagtcattaaaattacaaagatacatattactgctatggtgagattttcactatttatgactaagtgaaaaaacccgaatacaaaacaatatgcatagcttccttttctaaagcatgcatttttatgtgattctatttgcataggaaaacatctgaaagcagaagcactaaatgttggtattagttcacctaatgatggggtttgagtgactttttcctttttgttcatctgtattttcttttcctacaatgaacgtatatcacatatacttttttaggggatacaaataataggcacatgtggttttatttactttgtattctgagaaatttaggaagaaaaattctgcagagtcttctgaaagtaaagcaaattagcaagcaagaccctactttaggagctaaagtataattataatgaaaacagtaatgatgatgatttaaggaggatgatgcttctttgagtggctctcagggtgctttgtgaaaatttagaattggcacatacactgtctcagtttctaaaacctaaaaattggtcttgttttatagtagataaatctgacacctctcccgatcctcccattggttcaggcacccctctgtgcagtctcttataataagcctgcatgcacacatctctctacctttgtgcttaccatattgtattataattatcttttcatgtgtcttgtttcccagtagactttgagctctttgaggtctgaaccagtcttagtcatttttgcatcctctacgctgagcacaatctaactactcagcacatatttgtgaatgaatgaaaatgtcctattttaggttcattgtccacctgacagtttaattggcttctaggaaggaaaatataacacccaccaatttttccttcaacattttccatttttgcccctcctctgaagtgctaaaacaaatggtccttgtgtatgaatctatattttaattcctgtttgttttgttcatttagacattttcatctaggttttagcctttggatgggacaattgtcaactggatgacagtttgtgcttcttttccacacctgggagcctcttcaagattaactgcaatctacacacacacacacacacacacacacacacacacacagagaaagagagagagaacttaatttaagaatgagatacctttagagacctaaatgaatgaacacaatggtggaatttacaccctatggcagacaatcactgagatatttatttttaggaagggggagtttctggtgtccctcaaaccatattcttttccaggactcattttatatatctatagcatataggggattaactattagttgatcttactgagattcattctaatcaggacacaccatggtatgtatatacttgttgggaaaaaaaaaacacacactgttaaaatccatccaattctgggctttgaaatggaactttcttccacttctctgtgcttttaatcagtacccctctccctatacacactcacactcacagcctgtgttcttcttgtctaccaaaagaagagcaggattaagttgtccttgaacacacaggttctgcataagggaagtgatgtgaaaatttaagacaatcacctaaataattcaccctgaaaacacttttaccttaaaacattcagataatgaggtgggagatatatttcaaagcacctcaaataaccagataattattccaattctatacttgatttttgcaccaacctaatatataagacagtgatgatagtaagtgaaaataaaaacaacaccatcctgtaccgagctaatcatatttgaatggcaaagttctcaatattcttgtaaatttatttcattgtaataaatccaacaaactgtgagaacaatgtagcagactcaaatgaaaaagccccatcttccagaccacaagtcagctccctccttttcctttccctactttttgtggttttgatgtgaacatagaacatgtcttggaacccaggacttcatgttggtgcattagtatcattttatttatgtatttatttatttatttttgagacagagtctcgctctgtcacccaggctggagtgcagtggcgagatctcagctcactgcaacctccgcctcccgggttcaagcgattctcctgcgtcagcctcccgagtagctgggattacagacgtgcgctgccatgcccggctaatgtttgtatttttagtagagatggggtttcatcatgttggccaggctgatctcgagctcccaacctcaggtgatccacctgcctcagcttcccaaagtgctgggattgcaggcgtgagtcactgtgcctggtcgcattgatataatttttataagatactccagtcccaacccaggtacatatttttcaactttctaagcaaaattttaaataatattttcatagtaaattgggaatgttttcatcccttaattaaaaataaaccagtcaagctgggcgtggtggttcacgcctgtaatctcagcactgggaggccaaaccaggtggatggcttgagcccaggagttcaagaccagcctgggcaacacagtgagacattgtctctacaaaaaatacaaaaattagcctggcgtggtggcgtgcacctgtagtcccagctgcttgtcaagctgaggtgggaggatggcttgagcctgggaggtggagatcgcagttgagcctgggaggtggagccaagatcatgccactgcactccaacctgggcaacagagctagaccctgtctcaaaaaaacaaaaaataggctgggcgcagtggctcatgcgtctcaaaaataaataaataaataaataaataaataaataaataaataaataaataaaattaaaccaacccacagtcccttaaaagctgggctcttgcacaaccctaaactgcctcagataagccgtggtcagtttgtgagactcattgatcgtgtgcaattgtggccccatggcacgctttggattcaaattctcatccaacttcccttgctaccccaggtcgccctcaaactttgttcttttattcatatctggcaggaagctcagatgagtaagagaaatatcttgttttctgatggtcaaatcttgatttattatcactcagggccattatcgtctaaatgttctccgtggttctaaagctttagtgtacgagatcacgaggatgtgaaaggtacttttgaaaaattcaggtctcagaactccagccccagtgatgctgattctaaaattctagggatagggagtgggggacgcaggtggaatcagaaatctgccgtaagaataaaataaccacaggccaccctgacaaaggtggtcttctggcctccctttaagaagcactggggaggacctcaaccccttctgatggttggacagtgatattttaccagcagaggcaggaccctgatgcgttccaatggggtgttcctctctgagctctttggacggaatgacaaccccaagcagcagagcgtgttagcaacaggtaccccaaaggctggcttgcccgtgtatctctgtgcagggacgctttcacggcgttgtttccctccagagtgcacagtgagaggaagagcggccagctccgcccgtggcggtccccaccctgcgcgcccggccacttacttgcccaccaccaggctggcgccttccagcaccgccaggctgcgcagcgcatcccgcgccaggaagcgctcgccgcgggcgcacaccagcaccacttgctgcgcgttctccagcaggaggctgtggccgcctgccatgtcgcctcgcgccgagggtcgccgggaggccaccgggctcgggccaccggcaggactcagtggaggacgaaaagccgcagcctgcgctgtccggggctgggagggtggggcgggggcgggcgctcgcagccgctgccctttgctcgcctcccccaaccacagcaacgggggcggtaatcattgcaagaatggcaacgagtaataaacctgatgaggaatcctctcttttttggtcgtcttgtcccatcccgagtaaacgagatggagactagtgtccctacttttcagataaggaaacttaagcttggtcaccccgagagatcaaagtgaactgtgtggatcacgtggtatgtggaagcgcgtcaagggttggctgggtgagggcacccggagtgttcgggagtgagggaccggaacctggggtagagccccggaaggggggccatgggggaaacctctgcccgggggggttggggtgggagcctggagatagcgctcctggagagggcagagtaggggaaagctgtgcccaggggcagggacgggagcttggaggtagagccccgggagaggacagagtgggggaaacctctgcctagggtgctgggacgcgagcctggaggcagagccccgggagggtactgcgtggaggaaacatctgcccacaggttctggggcgggagcccgggacgcggagggccgcgagccgagggaacctgggggtggggaggagggggatgcggtaggggaggtgctcctgggtccgcgcgggtggcgggtgccgcgcacttatccgttggccagctgcgttccgggatcagctaccagacggtccctgagatgaccgggaaccgggctgggggaggatagagccgagactggaggatcgattggcacctccgcccacttttcccacaacgccttcccgaacgataggttggaaaggctcctggatccaaactcgctgaggtaaaataggtttcagctcagtgtccgcccctccgcatgcccccycccacccctcagctgtgtctggtgggcctacaagcaacttgcgaccaaaattggagacagaatcaagtttatggaagatggtctgtgattctcagcctcgtcgcttcctgctaccaattgctatagaaacactgccaggcccaggcttttgagtccttaattacttgatttcgtttattcatgtttatcacaagctctgtgttaagtcttgtggaacatacaaagataggaaaggcgctttccctgcccagtaaagactttacaataaaagtgatagatgtggacacaaataatatactataaaagcagactaagcctgcaaacccacaaaatataaaagttaatttagtctcattaaaaaaacctggaacagaaagcaaaaactcctttagatgaccacgataaataagaatataatttagcttcatattatggcctataaaagagagatcagttaggaaagagaaagataaaaattggaaaatatatagacaatgtgagtgaaagagaccctaagggtgggggggagggggcatcagaagattattcacagctcatatacacaatcacaaacaggttgtttgtgtgtgtgtgtgcatagcttttaaaaagtttatacatacatatatttctatgtctttaaaaagagaagtagaaatagtggggaatagaaacacataaagtcactaattcacagagaaatattaaaattttctattataaaatttctgctgaagactttaatcagttacattttgcaattttaggcatatttgcagaactatgcaattgtatgtataaaggatgggttaaaattatagaaaaatagggttcaataaacttgtcttagtctgagttctgtttcctataagctgtttgaccttggggaatttctttacagtaatttctcgaagcctcgttttctcatcctcatcatagggagagctgtttctactttatgggcttgtctgagttttaaataaaataaaacataaatcacttagcccagtgcccagctctaaacaagtaataggtattattactattattcrtgtgttttaatcctgctatttgtcttcctggccaattaagttaaagattagatttcagccaatagtatagttcctctcctgacttcacagaccatgtacttaragcttgcaagttctgggtgagtctaaaagaaattatatttctttttcataggtatttatgtttgtgggtgaactgtgcatctgattcacagtccagacagacaacattacctgataagctcctgcaaacaggaggtttgcaaaagcagaaaggatgagtgaatttctttccttagttactgttcagtagttatagatggataaggatgacacatttttccttggtaataaccaacatcccgatagcagctcttataaaatacttttcacattatctgacttgtatatgctgactccttaacccatccttccttcctcttgacctccagttttttttttgtttgtttgttttttttcacttcgcaaaaggggcagtcagaaatgtcaacagaagcgtccatactaaatagcctgacgccagcagtgccttaaaggtcaaggtgaaagtaatttcctcatcattgtgctgtgctctgacctagtcagaagcggcagcgtgcatctaagcaggccaaggacccagtggctcctggcttttaggtaaacaaaaaattgctaactgtgatctccccacaccatccaaggacacagttcacagccccttttcctagtatttgtccaaggtaggcggagaggaggtgggaaaaaaaaatggaagggcattgggtctgagagaaccagtctaaatcctcatatgcatgtgaagataaacattgctttttatctcacattgagatcatctggaaattcgttttcattgggttttagagggggttgttgcaaaaaaacaaataaactgattcgaataatatctggtagacagtgttattattcattttatttagagttggtttagaaacttaggactgggccttatcaaatcccactcctctttccccacttcccctggagctcagaatgttaagactctacatgaagctgattcaggtcccccagatttgcactgatattgctggtagactcctctccaatgaycaggtttcaagaactttgattgggagtttcttacaaaaagtagttgtcagttatgctyccatttcaaatggcggcagttgacagagtgggccagaaagaggaaggatctggacaatatctagtttgaaaaaagtataagggatcacttcttcacaagcctactatgagcaggcactttgcatatattatctgtgtttgaaaattgcaccaggcctgtaaggaaggtgttattattcatacttgatagaagattctacagtgcattaagcayaattctctagacccaagagaaagagtggataagagtcagaggcaggagttaaacctacctgcccccaaaggccaggggtctttccatagtgccattcctactacccttgcaatgacacttgtcaagagacctgactcagagaccacatataattgtacagctattaaaggaacacaacaattaattaaatcaaccagcatggkgttcacttgaaagaacagtatacattacacccatgtccctttagatatctaatatatatctcaaatttcacatgttccaaaatgagcctctgatcttcccaagtgccccttcccccactgccttctctgtctccatttatggcaactccatcctttctgcaatcagttctttatctcatactccacatccaaaccatcagccaatcctgtagactctactgtcaaaacacatstagaatcggaccacctctcaccacttccactgctatcccaaggaagggatagcattatctcttgcctcccagtggctgtagtctcctagtagatctccctgtgtgacccttttccctttctacagtctcttctcagctcagcatcagagtgattcattgaatggttccatttcactgagaaaatggcctccagggccctcgtgatcttggacttcttgtctctctggcttcatctggggtgctgtcccctttgttcactgtgtttaaggcccactggtgtccttactgttcctgaaacacaccaggcacattcctccctcagagtgcacctctccatgtgcttacactcccatagcacatactatgcaactgaggccatccaaaggctggacgtggtaacttacctaacaatcccacaaggtagatactatttgcatcattcctcttgaaagatggggaaattgaagtgtgaggattaagggacatagagagagtctatgttcttaatcatttagcttatgcgacctctaaaatggatggctggcagttatacaccaccattttacattcctgatatttctgagcttttgatctttttcatctattggaagttggatgtgaacgtgtatttaagatgtgaactttcaggcatttgctatgcaatccaataacattttccctctcttttggtacagagcctttgtttagccatcatgctatttttatttcgcacaacaaagacatccactgacttcaacattttttctgattggaaaggggactttataatcccttcctaacaataactggttctgttcctctccctcccttttgttcaccaacctttcattcatcaatacaggaattcatgcatatggaagtatagaagtataacaacatctggagactgctgattgcatttacatgttatatgaactatataatagagacagaataagagcagatatctgctcttagcaattggtttaaaggaacagaacttccagtttttctgtgagtgaaaaagtccttgaacccatggataaagatgctcattgcaaaaagactttaaggataaagggaatgagagtgggaaggagagtgaatttagatagmtagaaggaccaaaggagtgaaaatgtgacaagaaagaggtgatcagaatcctaagagtggagatgagtacagagtgtaaaattgagaaaatctacaaatctttagtattagccatccaaattccaaatactcatcaaccacaggttgtcaccaatttttcaccgatctttcttttcccccgtgagaatgaatttaatgcctgtgaaaaaatgttcagtcatttgaaaaagtataatgtcaatgttatagtttttattcatttttttctcttttataagctttgacataattttttaaatatttgtttttataaccactggaactaaaatcagatgctaattagtaaatattagcacataatagttcccacttactgagctggtctgtaagccaggcaccccacttggttaaatccattgcccactgaatcctcaagaaagccttaagaggtgtgtccactttatgaaacaggaagcagaggctcagagatgctgagtaattaagatgtaggctccatgaagacaatagtttttgttcttttttgtctttttaaaaattgccctgtcccccacacgtagaacagtrcctgacacatagtaggtactcaataaatgttttttgaatgatacatgaacttgctcacacataagtaaataccaaaccaagattcaaaaatcaggcttgtccaragtctgtgttcttaatcatctgctgctctgcttccgggatatttagctcttatatatggctctttgagattcctgaggcacatatttaaatgagtagcccaaaatagaatgtgttgtccattgtttctgctgcgggcacatttttaaatataaactcctgggtgtcctttatccccaaaatgaatatatctttattatttttctcattgtaasagttacaccagctcactgagaaatttgaatgatactcaaagtatagaaatcaraacaaggattagggtaaggccagtgaagctctagcttcatgcataaaatttaaggggaaagcaaaaactcagtaatcaaaataagcaatattttaattcactattttaaatatataaattaatgtaaaaaattcatgataaatgaaataacagaattttaaatagagacaagttctgtgggccaggatttgggtgagtagagtgaggcactggctctcagggtcacacaagtacagggtcagagactgtccgtatttacaattttgatattttgttcattatagaatttcctgcatttatttggaattttataaaaatatattgcattaacatttaatttatcataataactgaaagttgatttttttgttttgtttttgtttgtttattttggcaatccttaagctttgcagctaagattgagtgcctcaatcacctaaccctaatcccaaacctggtaaaaatgagagactgcaccaaatcacatgtaatcaagattcatgtttgatgaatggcatttcaaacacctctcagatttttgcatgcattttttaatccacactatccctactcttttgaaatgttttgttttttaaccaataccatggagagaggtaaatagtgactacagcatcattttaagggccaaytggaatttattttatggatataccatagttatttggtcaactctgtatttatgaaatgacattgaacaaacattattgcacatgcttttttggctgcttgtctgattattttcttgacataagataccagaattgaaattgctgggtcaaagagtatgtgtgtgctcactgcttttaaaagccataaggactgttaaggagtcattggcagttgaatttagcccttttatatgatgttcatagaatttttaaaaaacgtattttttttctttcaacagggccaggcaagaaaatgtcctcaaatttattgccaacactgaattctggaggtaaaaagaaatcaatcaatatattcttgtttgggcctggcagtgttaggctccataacagattgtgagcataagaaaaggagaatgttacaccataaatataaaakgtaatgagtttataaactacctgcagagaagattctgttctactttttaattcaaaaaaaaaatcttcaaatcagagggtgcattaaattgtcatatttagccagattgccccagtctctcatgacagaaaacaagtaactcaattatttgtcatagtcaaggacatacctaactaaactttatgaaaatctgccctcttctttcctttaccaccctttctcatcttatccttctgcctattttttatttttatttattttattttatttaattaattactttttttgagatggaatttcgttcttgttgcccaagctggagtgcattggcgcaatcttggttcactgcaaactccgcctcctgggttcaagtgattctccttcctcagcctcccaagtagctgggattagaggcatgcaccaccacgcccagctaattttgtgtttttagtagagacaaggtttcaccatgttggccaggctggtctcaaactcctgacctcaggtgatccacccacctcggcctcccaaagacctgggattacaggcatgagctatcatgcccagcctccttctgcttatttatgagcatacaaggaattagtatttattggtatataaggaattacaattttctcttacaaatctgacaaaaatttaacatttggataacactaagagtttgtaataggtaacaggcactcaggctctctataggcattctctttaaaggaacatttgacactatttgtatttacaatgtaaaagtttggctgcaagagacagaaaatataaaacaactgtggcttaaacatgatagacgtttgttctctctcaggttaagtctggatacaagcattccatatggaggttcacatcaggggcccaactccttctggcctgttcctgggctatgttcttggtccaagacggctgcttccacaccagtgattacatccatattcctgccagccaggagaaaaggggaaggggggacatgccctgaagttgcattcaccacttccgctgacctgcctccaagggaggctgagaaacatagcctctactctgagtgttcatttagggttctattcctatagaagaaggaagaatggatattgggggttcactagtagtatctgctccactaccattttttttaaaaaagcatttaaaaggagccatgtttggaatttattctacagatatgtatgcacaagtgattaaagatgtgtgtacaggaatatttattgcagcattgtttacaatagcaaaagactggaatcaatcataatgtccattggaaagggttggttatgtaaactataatacaaccagggaatgggataatgggatactagacagacagcttctctgtcacccaagctgaagtgcagtggcaccatctcggctcactgcaacctccgcctcctgggggttcaagcaattctcgtgcctcagccttccgggtagctggaattacaggtgcccaccacgcctggctaatttttgtatttttagtagagacgggttttccccatgctggccaggctagtctccaactcctgacctcaggtgatccgcccgcctcggtctcccaaagtgctgggactacaggtgtgagccaccacacccagcctagttatttagttttttttttttttgatgtcgtgaatatatatttgctgatataaaaggaactcctaggtatattgctaaccaaaaaaaacaaaatgcagaatattagactagtatggattggatgatgccttttttaattaaaggatttatattactttgtcaagaactgtgacagggctaagattttcctctacttgcaaactcataagttagcttgctacagtttcctggatgttgacaagagatacaaaactcttgggtcagagacaaacgactttattactcacaaaacaacaagcagcatgagttttgacatatttggtaccagttccctaagacccatagccttcttttaagattaatacaattatatattaataacataatatgaacctttgaacccatcagaacccaaagacgaggatcttcacaagaaattacaacctgacaataactacataccctatcccttggctttcaacacctaagccaggcaccatgttgaagtctgtttagaatttttcttcactattttatttgtatgtatagttttatactgtatatatgcagtcttaaagagcatatttttcattttagttttaacttttaaaaaagtatatcttgttgactatcatattttagaaatttttcagttaacattatatatatacatacatatatatttattttaatcttttaaaaacaattgtttttatagacaaggtcttgccatgttgcccaggctggtcttgaattctcgggttcaagcratccacttcagtgtcccaaactattgggattacaggagtgagccaccatgcccagccaacattatattttaagattcattcatactgttgtatggtttagatcattcattttcactgctgtataatatcacaaaatgcaaatgtaccatagtttacagttgacacttctttgggtatttgggttgttttcagcttattgctactaaatggtgctgctaataaacattcttgttcacatctcctggtatacaagaaagtttctttgcatgtatacctaggaatagaattgctgaatctgacgttagctgagtattcaacttcagataataatgtcaaagtgttttccaaagtagttgtgccaatcataactctacaagaaatgtattagagatcctgtggaattatatcctctccaaacacttggcattgtcaagttttttaatgctttgccaatcaaatgggtgaaattatggtctttatttgcatttccctgataactaatgaagttgaacaactcttcatatgtttattgaccataaatgtttcttcttctgttaaatgcttatttaatacagtcttttttctatttttctttaggttgttagtgctctttatattgatttgcagttttgtagatgtggtatatcccaattatgtcatctctatggagtacaaatattttctcccagttttaatttatctttcaatttgtttatggcgtcttttgatgaacaaagtctttaatcttaatatagctgaatttatcaatattttcttgtatagttactactttttgtgtttttaagaaatctttccctagcaaaggcctaaawgataaaacctatatgttctactgtttgttttaaaggtttttgggggacaattttatccttatttcatctgtagttaatktttgtatggagtgtgaggtaaagatccaatttccttttattccatgagaataaccattttctccgactcattttttgaacagtctctcctttccccatgtatggatatgttcctgagatttccattctagtccattagtgaatttgtctttccctttactgtagctccataatgatacacagcagagcaatctccccatcctgttcctcttgggaagggttctcactattcttgtctcttggttttccttactaattttagaatttacttatcaagtttatttagagaaactcgtatgggactatgtacttatattactgtgaatccattgatcattcgtggagaattggcatttttatgaaatcatgtctctctatccacaaacatgactcatctctctattaatttagatctactttaatgtattttaagattatgttatgcagttatttcaattctgcagttttttagtgccttttatatactaacctagctgctcggggttcaaatatgaatacatcagtacgattggagacagtaaaagccatgatttctaaaaagatacttaatattggtatgtactccaaatatgatttaagaaaaaacaaaatcaagtccagaaacaacaccaaaaaatgaagaaacaaatggaaggaagaaaggagggaaagaaggaaggaaaaatgagtgcttgagggaaaatacctcatatgcaatctattagggaattctgttggttctcccttcagaatgtactcagaacccaaccacttttcaccattttactcctaccatgctggtctgagcccattacctcttacctgaactagtctgatctcaatccttgactcccccactccaagtctcttcttatccaactacaaagtattaagtaggtcagaccacattccttctctgttcaaagccctccaatacttctctggtttactgagggtcattgccmaagtcttcaagactgcctacaagatactaagtaattatccttgctactacagtcccccgaccccatttatttcactccagctacactagcctttcttgaacacacacaagagatgatcctgcctcaggacctttgcattggctgttgccacagccagtacctctcttcctcagatatccacttgactggttctctcaactcctttaaataccacttgatcaatgagacccattctgatcactctacttaaaattgttcaccccagccctcctatattctgctttatttttcccacagaactttattactttaaaacataaaagttactttattatattaatgtttatactttctatttccaaacctgccacttcacctcagtataagatcttcaagagcagccatctttgttttgttcaccagtgtaacatcagtgcctaaaacactacctggcacatagttgaggcttcattggtatttgttgaatgaatgaatgagtggatgaatgaattaatgaataaatagaagaattaggacaagacaaatagagtgtcagtaaggagcaagtctaggaaaggagtgagactgtgtgagacagaataatggccccccaaatgtgtccacattctaatccctggaacctgtaaatacgttaccttacatggcaaaagggactttgcaaatatgattaagttaattaccttgatatgggaaggttatcctggattagccaatgggcctaatataatccaagagtccttttattcaaagaccgagaaggtgatgtgacaatggaagtagaggctaaagtgatgcactttgaagatggaggaagagaccacaaaccaaagaatgcaggcagcctctaacagctggaaagagaaaggaaactgattctcacctggagcctccagaaggaacacagctctatcaacatcctgattttatgctcaaaggactcatttcagacttctggcctccagaagtgtaagaaaataaatttgcattgttttaaaccactaggtttgtggtaatttgttacagcggcaataggaaactaatacagtgaggcagagaagagaaagccttctctcaaggtdattagtaatgtcagggatttgcaaggcagcttagagaagaatataatagtaacaaaaggaagagatctagagtttagagtttagagtagccaggattcagctactagaatttgatttgtagatctaagcagaccccttattgctaaaatggagtattggagagaggttgagcctagcgtccagtttgctaaagagctggtagaatgagactctgtgttgaggyagaagacatgattaatggtggaatttgatgtacattgcaggtatrgagtgctgtaaggggttgaatttagactccaaaagatatttccaccaagaacctgaaaatgtgaccttgtttggaaagggggatctttgcaaaagtaattaaagtaaggatctcaagatgagatcttcttggatttaggacaagggctaaatccaattactagtgtccttataagagaacagaaaggaagatttgcgatacagacacacagaggggaaggtcatgtgaagaatggaggaagagattggagtgatggatctacaatccaaggaatcccaggaatttcactaccagaagctaggttaaagtcatggaatagattccccctcagagcctccagaaggaaccaacactgctaacatcttgattttgaacttgtggcctccagaactgtgagagactayatttctgttgttttaagccaccctgtttgtggtaatctgctacagcagccctagtcctatgtgactaggaaagaaatacrgggagaagtgttgcctagggactagttcatgtggtgagtttataatataggaaatttggtgtagcgggttgaatagtggccctccacaaatggttggccttcctattctaacctctggaaactgggaatgtggccttatttgggaaaaggatctttgcaaatgtaattaagataaggatctcaagatgagaccaccctgaatttagggtgggccctaaattcaatgataagtgtccttataaaagaaagaaaaggagaaggccatgtgaagttggaggcagaggttggaattatccagccaatgaatgtctagagccatcagaagctagaactgtggaaggattctcccctasaggcttcaccaagagagcatggctctgccatcaccttgatttcagatatctgacctccagaatggagagaatacatttctgttgttttaaactaccaattttgtgatatcttattatggaaacaagaggaaactaatatacttggtgttcagaaatttagttttcttctatttctctgtaaactgaaataaactcagctttgaacttggagggacaaaaatatcatcttgtcaattccaagacagttaaccttggtcagtagagattttaactcaggcattaaagattttaagacacttgcgggggaggagccaagatggccgaataggaacagctcccgtctacagctcccagcgtgagcaacgcagaagacgggtgatttctgcatttccatctgaggtaccgggttcatctcactagggagtgccagacagtgggcgcaggtcagtgggtgcatgcacagtgcatgagccgaagcagggcgaggcattgcctcactcgggaagtgcaaggggtcagggagttccctttcctagtcaaagaaaggggtgacagatggcacctcgaaaatcgggtcactcccacccgaatactgcgcttttccgatgggcttaaaaaacagcgcaccaggagattatatcccscacctggctcagagggtcctacgcccacagagtctcgctgattgctagcacggcagtctgagatcaaactgcaaggtggcagtgaggctggggtaggggtgcccgccattgcccaggcttgcttaggtaaacaaagcagccgggaagctcgaactgggtggagcccaccacagctcaaggaggcctgcctgcctctgtaggctccacctctgggggcagggcacagacaaacaaaaagacagcagtaacctctgcagacttaaatgtccctgtctgacagctttgaagagagcagtggttctcccagcaggcagctggagatctgagaacgggcagactgcctcctcgagtgggtccctgacccctgacccccgagcagcctaactgggagtcaccccccagcaggggcacactgacacctcacacggccgggtactccaacagacctgcagctgagggtcctgtctgttagaaggaraactaacaaacagaaaagacatccacagcaaaaacccatctgtacatcaccatcatcaaagaccaaaagtagatacaaccacaaagatggggaaaaaacagaacagaaaaactggaaactctaaaaagcagagcgcctctcctcctccaaaggaaygcagttcctcaccagcaacggaacaaagctggacggataatgactttgacgagctgagagaagaaggcttcagatgatcaaattactccgagctacgggaggaaattcaaaccaaaggcaaagaagttgaaaactttgaaaaaagtttagaagaatgtataactagaataaccaatacagagaagtgcttaaaggagctgatggagttgaaaaccaaggctcaagaactacgtgaagaatgcagaagcctcaggagctgatgcgatcaactggaagaaagggtatcagcgatggaagatgaagtgaatgaaatgaagcgagaagggaagtttagagaaaaaagaacaaaaagaaacgagcaaagcctccaagaaatatgggactatgtgaaaagaccaaatctacgtctgattggtgtacctgaaagtgatgcggagaatggaaccaagttggaaaacactctgcaggatattatccaggagaacttccccaatctagcaaggcaggccaacattcagattcaggaaatacagagaacgccacaaagatactcctcgagaagagcaactccaagacacataattgtcagattcaccaaagttgaaatgaagaaaaaaatgttaagggcagccagagagaaaggtcgggttacccacaaagggaagcccatcagactaacagtggatctctcggcagaaaccctacaagccagaagagagtgggggccaatattcaacattcttaaagaaaagaattttcaacccagaatttcatatccagccaaactaagcttcataagtgaaggagaaataaaatactttacagacaagcaaatgctgagcgattttgtcaccaccaggcctgccctacaagagctcctgaaggaagtgctaaacatggaaaggaacaaccaataccagccactgcaaaatcatgccaaaatgtaaagaccatcaagactaggaagaaactgcatgaactaacgagcaaaataaccagctaacatcataatgacaggatcaaattcacacataacaatattaacctcaaatgtaagtggactaaatgctccaattaaaaggcacagactgacaaattggataaagagtcaagacccatcagtgtgctgtattcaggaaacccatctcacgtgcagagacacacataggctcaaaataaaaggatggaggaagatctaccaagcaaatggaaaacaaaaaaaggcaggggttgcaatcctagtctctgataaaacagactttaaaccaacaaagatcaaaagagacaaggccattacataatggtaaagggatcaattcaacaagaagagctaactatcctaaatatatatgcacccaatacaggagcacccagattcataaagcaagtcctgagcgacstagaaagagacttagactcccacacattaataatgggagactttaacaccccactgtcaacattagacagatcaatgagacagaaagtcaacaagcatacccaggaattgaactcagctctgcaccaagcagacctaatagacatctacagaactctccaycccaaatcaacagaatatacatttttttcagtaccacaccatacctgttccaaaattgaccacatacttggaagtaaagctctcctcagcaaatgtaaaagaacagaaattataacaaactatctctcagaccacagtgcaatcaaactagaactcaggattaagaatctcactcaaaaccactcaactacatggaaactgaacaacctgctcctgaatgactactgggtacataacgaaatgaaggaagaaataaagatgttctttgaaaccaacgagaacaaagacacaacataccagaatctctgggactcatccaaagcagtgtgtagagggaaatttatagcactaaatgcccacaagagaaagcaggaaagatccaaaattgacaccctaacatcacaattaaaagaactagaaaagcaagagcaaacacattcataagctagcggaaggcaagaaataactaaaatcagagcagaactgaaggaaatagagacacaaaaaacccttcaaaaaattaatgaatccaggagctggttttttgaaaggatcaacaaaattgatagaccactagcaagactaataaagaagaaaagagagaagaatcaaatagacacaataaaaaatgataaaggggatatcaccaccgatcccacagaaatacaaactaccatcagagaatattacaaacacctctactcaaataaactagaaaatctagaagaaatggataaattccttgacacatacactctcccaagactaaaccaggaagaagttgaatctctgaatagaccaataacaggagctgaaattgtggcaataatcaatagcttaccaaccaaaaagagtccaggaccagatggattcacagccgaattctaccagaggtacaaggaggarctggtaccattccttctgaaactattccaatcaatagaaaaagagggaatcctccctaactcattttatgagkccagcatcatcctgataccaaagccgggcagagacacaaccaaaaaagagaattttagaccaatatccttgatgaacattgatgcaaaaatcctcaataaaatactggcaaaccgaatccagcagcacatcaaaaagcttatccaccatgatcaagtgggcttcatccctgggatgcaagcctggttcaatatacacaaatcaataaatgtaatccagcatataaacagaaccaaagacaaaaaccacatgattatctcaatagatgcagaaaagacctttgacaaaattcaacaacccttcaggctaaaaactctcaataaattaggtattgatgggacgtatctcaaaataataagagctatctatgacaaacccacagccaatattatactgaatgggcaaaaactggaagcattccctttgaaaactggaacaagacagggatgccctctctcaccactactattcaacatcgtgttggaagttctggccagggcaatcaggcaggagaaggaaataaagggtattcaattaggaaaagaggaagtcaaattgtccctgtttgcagatgacttgattgtatatctagaaaaccccatcgtctcagccccaaatctccttaagctggtaagcaacttcagcaaagtctcaggatacaaaatcaatgtgcaaaaatcacaagcattcttatacaccaataagagacaaacagaggaccaaatcaggagtgaactctcattcacaattgcttcaaagagaataaaatacctaggaatccaacttacaagggatgtgaaggacctcttcaaggagaactacaaaccactgctcaaggaaatagaagaggatacaaacaaatggaagaacattccatgctcatggataggaagaatcaatatcgtgaaaatggccatactgcccaaggtaatttacagattcaatgccatccccatcaagctaccagtgactttcttcacagaattggaaaaaactactttaaagttcatatggaaccaaaaaagagcctgcatcgccaagtcaatcctaagccaaaagaacaaagctggaggcatcacactacctgacttcaaactatactacaaggctacagtaaccaaaacagcatggtactggtaccaaaacagagatatagatcaatggaacagaacagagccctcagaaataatgccgcatatctacaactatctgatctttgacaaacctgagaaaaacaagcaatggggaaaggattccctatttaataaatggtgctgggaaaactggctagccatatgtagaaagctgaaactggatcccttccttaccccttatacaaaaattaattcaagatggattaaagacttaaacgttagacctaaaaccataaaaaccctagaagaaaacctaggcattaccattcaggacataggcgtgggcaaggacttcatgtctaaaacaccaaaagcaatggcaaccaaagccaaaattgacaaatgggatctaattaaactaaagagcttctgcacagcaaaagaaactaccatcagagtgaacaggcaacctacaaaatgggagaaaattttcacaacctactcatctgacaaagggctaatatccagaatctacaatgaactcaaacaaatttacaagaaaaaaacaaccccatcaaaaagtgggtgaaggacatgaacagacacttctcaaaagaagacatttatgcagccaaaaaacacatgaaaaaatgctcaccatcactggccatcagggaaatgcaaatcaaaaccacaatgagataccatctcacamcagttagaatggcaatcattaaaaagtcaggaaacaacaggtgctggagaggatgtggagaaataggaacacttttacactgttggtgggactgtaaactagttcaaccattgtggaagtcagtgtggcgattcctcagggatctagaactagaaataccatttgacccagccatcccattactgggtatatacccaaaggactataaatcatgctgctataaagacacatgcacacgtatgtttattgcggcactattcacaatagcaaagacttggaaccaacccaaatgtccaacaatgatagactggattgagaaaatgtggcacatatacaccatggaatactatgcagccataaaaatgatgagttcatgtcctttgtagggacatggatgaaattggaaatcatcattctcagtaaactatcgcaagaacaaaaaaccaaacaccacatattctcactcataggtgggaattgaacaatgagaacacatggacacaggaaggggaacatcacactctggggactgttgtggagtggggggagtggggagggatagcattgggagatatacctaatgctagatgacgagttagtgggtgcagcacaccagcatggcacatgtatacatatgtaactaacctgcacattgtgcacatgtaccctaaaacttaaagtataataataataaattttttaaaaaaagacacttgggatagggcagaatctaagtttgtagagtttctcttgggagaagagaaggctgattggggaagaggtgtccagcccaccaattactcatcccctggaggacaacagtggctccatattgggatgtctggggtccagccctggcctgggagtgatggtatataaggcataggtccatggactctgtaaacaccactgtattaggcagaactctccagaaaaacagaaccaataagaaggagatttactatgagtaattggctcatataattatggaggctgagaagtcccatgatttgccatctatacgctggagacccaggagagctggtgatgtaattcagtcagactcagaaagcctgagaagcaggggaactgatggtgtgagttccagtctcagcataggagaagatgagatgagatgtcccagttcaagcagtgaggcagaaaagaaggggttacttcctaattcctcagccttttctactcagaccctcaagagattggaygagactcacccacatggatgagggcagtctactttactgagcccaccaattcaaatgctaatctcacctggaaataccctcacagacacaaccagaaataacatttaatctgggaacccatggcccagtcaagttgacgcacacaattaaccatcacaggcacctggccccaggtccttttgagtcctcaatctctgtggctacctcctggtcttcagcctgttggctttgctcgtctacacttctgctgtcccagagtctagctgcctggacccaccctcagctgtttctacttcatgtttttaaggcctaaaattttatgtgctgccttgacatatttcagcctcacagggccccaaaagcctaaccataaatcctcttgctcttgccaaatatgacrtccacctagcaggaaactctccckgcctggctagttcctctatcaattggaccagctgcattccacctggtcttcaacctaatgggtttcactgcactgtcagccatgaaattattcaaacaagtcaatcacatcctcctgtggggaccaggggacacctcagccttttgttactacaaagttgcctcccaccactggtgattcactgtgctcctgagtgcaattcccatgtggcactgcattgcaggcagcattctcctcccccaggctatgagtatatatgacttataaactgctttcagtctcatatgtccagtgttgggtatcatgtgttcagctatctcgtagtatttaggatgggggattcactccatcaccatcagggtgaataggagatgatcagagtactctgtgttgaacccaagacttccactctgcaattttctttctctctaactcatgacttacagaaaaatgtgtytggagtttctataatcccagccactcccactttctacactgaatctttgggcaaatggctgcttctcaggtagactttaagctccagtccattaattccttaaactttggtccactagctcttagtcctggatgtacattacagccacctgggggactctcaaaatattccagtgctgatgtttccttgacaaattaagtcagaatatctggaggtgggtggagccaaaatgattctagtgatttggggcaagaatcattgagtttcttcacaggccctctgcttgctgggaggatgtggagtctttttgtaaggttgaggtggacatgggatgtggggtaagagttggggaatgtgtcttcaggaatcctcttcctatctctgatttaaggtgtcaactccaggctcccagtattcttggttatatggtttggctctgtgtccctacccaaatctcatctcaaattataaaccccacatgtcaaaggagggacccgtaatccccatgtgttgagggagagaggtgattggatcatgggggcgttttcccccatgctcttgtgatagtgagtgagatctcacaagatctgatggttttatacaygtttggaagttcytccttcatgcttctctctcctgccaccttgtgaagaaggtgcttgcttccccttagccttctaccatgattgtaagtttcccgaggtcttcccagctatgcagaactgtgagtcaattaaacctctttcctttgtaaactaccgagtctcagagaagttctttatagcagtgtgaaaatagacaattacacttgaccttgactattggttttgaaagtcaagatttccatcctgccacatcccaagagttagaaagtaagaaataaagaaataaagagagagaaagtttttttgtcatatcaaatgttataaataaaaacaggaagtccatgcagaaattcaactgacttttctttttctttttctttttcttttttttttttgagatggagtttcactcttgttgcccaggctggagtgcaatggcatgatctcggctcaccgcaacttctgcctcccatgttcaagtgattctcctgacttagcctcccaagtagctgggattacaggcgtgaaccaccacacccggctaattttgtattcttcgtagagatggggtttctccacgttggtcacgctggtctcgaactcccgacctcaggttatccacccacctcrgcctccsaaagtgctgggattatacacgtgaccactgcgcccggccctcttttgcttttttaatggccagccttcattttttatttagtgtagaacaattatgtgcaaccatcactacagccaattttagaacattttcactaattcaaaaagaaacctgcacccctcagccatcaacccctaggccccatccaccctccagccccaagcaactactcacctactttctatctccatgaatatgcctattctggatattttatataaatggaatcatataatgtgtggtcctttgttactggcttcttttacttaacatrtttccaatgttcatccatgttgtagcatatattgtacttcattcctttctctgggcaaataagagttccttgtatggatatactgcattttgtttatcgttaatcagttgatggatattgtattaatctgttctcatgctgctaataaagacatacccaggctggctaatttataaatgaaagagatttaatggattcacagttccatatggttggggaggcctcataattatggtggaaagtgaaagaggaggaaagtcacgtcttatatggtggcaggcaagagagtgtgtgcaggggaactcccctttataaaaccatcagatctcatgagacttattcactatcacgagaacagcacaagaaagaacccctcaacacgattcaattactttccattgagtccctcccatgacacatgggaattataggagctacaattcaagatgagatttggatgaggacacagccaaaccatatcagatatctaggttgtctctattttttggctattaaaaataatactgctctaaatattcatgtacacgttttttgtgagcccctatgctttcatttctctttggtatatcctagcagtagaatttctaggtcatgtggcaattctgtgttcaactttttaaggaactgccagattgttttccaaagtgactgccccacttaaacattccttctaggagtgaatttgggtccaatttctccacatgctctccagcactttttattatctttgactttcttttttaagactctctaatctgggcagaggctctccctaagggtagtggctgtatctgttgctgttgaaatggtggtgtaagggtaatggtggtatatgtataatggtgagaagaaacatattaatatctcaaaattttatcctactattttggtaaagacctccttattttatcaactcattcctcatgaagcagtaagagctatgtcggtgctgtgggaaacagacagaggagctgtgacttctacccaggagatgtggaggcaaggctatctgcattctactgttaaagcaaactaaacatggcctgagaaggactccatactccatacttctatatttgagtccttgtgaacgaactgcaacctaacttaataggtagacaaaattaaaaccctaacgtagaagtatgccctgtaacaatagctgaatcttggcctaatcccagcagccgtacctcaaccactcatacactgctgagtgctcaaactgtgttcaaataaggcaaatgccgagctgtaaccaatccagctgtttctgtacctcacctgagatttctgtacttcacttcccttttttgtctataaatttgttctaaccatgagatatccctggagtctctgactctgctgtgattctgggggctgcccgatccacaaatcattcattactcaattaaactcctttaaatttaattcggccaaagtttttcttttaacactaccttctcagagatccctgcatcccattcattccaccctagctggtgggagacttactattctggtcagcagaggaaggatgacagaattcattcattcattctttcttttttaacaggtaaagtaaaagatggctcaaccaaagaggacaggccttataagatctttttcagagatctctttcttgtcaaagaaaatgaaatggcagcaaaggaaacggtaaagtttaattaaaatcacaaccccaattaatgttagaatcatatccacttacctattgctcttatgaactttgctgggctragacatggagtcaactagacgcagatggtgtgtgccccacaccatgatggggagacagtgtgaacacaaacgacagaaaaacatccagctgacagtaggcagcacaaagatcgccacctaacggaggaagagagatataccactgcagtccagtaggacacgtatggtacactgtccttcattgattccaacacacacatctccacattttttacatttctgaaattggtacctagcttacatagatgggatgtcatacatcactggccctgcataaaataatagcacatcttacaataagtggcatctcagagtggaggaaatacagtaacagaggcgtgccaaagaaatatagagaaaggggtgttcatctttgttgatgagaagatggaaaaaaggctgttagtggtgaggagataaaaggaggtgggtcttcaagaatcagatatggataagacaatgyatatgtgtgtgctggggaaggaagaarggatgaaagtagaggagggggtgttgttttcaaattttgtggtatgaagctagatcaatgataaggctgattttcccactgtgccttgcagagttaatctcaccactgctgtggtcatcacacctacatcgcctggttcacatttcagtagatttactttctttctttccagaggtaaaagttgattacaggactttgtctaccctaattaagataaggaaattatctagaaatgctcaacaacagattcatctgtatgcgatggttcctcagcaagtgttgtatggttttgtggaacatacttaaaattaaattgagagaagatgaatgaaatcacaagcctaatttttaaatatctactggggagatccctttcctctcaagttttaattccacagaaccaacacttagaatttcctttttttttttttttttgacagtcttgctctgtcacccaggctggagtgcggtggtgtgatctcggctcactgccacctttaccaccaggttcaagtgattcttgtgcctcagcctcctgagtagctgtgactacaggcacccgtcaccacgcccggctaatttttgtatttttagtagagaggggtttctccatcttgatcaggctggtcttgaactcctgacctcaggtgatctgcccgccttggactcccaaagcaccaggattacagacatgagctaccgcacccagcccggaatttccaaattttaactgcattttgagcaagactaaattgtgaaaatgaagctgagaggacattttccagtcttgtatttgtgatgtacatatttaataaaagttaaatgatctcagcttcatatgagaaggaaactaaaacaacacacattccttcaaagagaagaacctggggttgtttttttaatgttaagatttttgttgcaaatgttatttttatatataatcactaattttaagataacatactttggtatattaaaaattcttttcaacttttccacttgggcaggaaaaatttatgaaccgtaacatgaaagtctaccagraaactactttttcatccagaatgaagagtcattcatacctgagccaactagctttctaccctaaaaggagtggtaggtcatttgaaaagtttgggccaggtcctgctccgattcctagattaatagaaggtgagtctaaattactctttaagaacatcattttgaatatttactattaatgtcaggtttgggagctttgttggagggtgattaaaacagacagtatgctctcttataatggtagggagtcttagtacatggggattgagagttaggagaaattctatgttaaataagaaaacatacttttccaagatgactgttactcattttcataaccgtcctcccaggaggacagttactgccaaaagaatgtagtattaaagtttgcaaaagyggataaaatgtaaaggtaatagctctggccattcatactcagttctagatgtcaaacttagaagtttctaaagataaaaaagccttgatatccaagccaaagaactcatgcatccagaatgaggaagctaataaaattaaatgagcttacctaatgttgcaaatacctaatctggttttagtgacctttggaggcaacatattaaaatactataagatgatcattactactcaacaaaagaaggcaatctgattatcaaaaatgacaagtagggggtatcctacttgtcaaaccaagtagtgcctatagatgagatagaaagtactttgaagttaatgaaaataaagtgattaatgctaggatgatggagtctaaaatcttcccccaaaatgaatgttttccaaattgttaaattaaaaagtttaaaataagaagggaaaaaaggaaggaaggaaggaaggaaggaaggaaggaaggcaggcaggcaacttaaaaaaattttctctggatcccaaagcccatgcactttctcaaactgtaaaaaaatttttcagagaacaagcaaaccacttagggaagggctttggagtcaataattaatgtaggaaaaggaagccatgttaacttattcagaagagcttccaagtgcatatataattgtatgtaaaagcagcaaatgataggcagcaaggtgatgccagggactgtaccacaagttctagggcatatctacgttcaatcacatgcctcatagttcrcctccgtagagtggtaaaccttaggtcatcaagagcatttacaattacatgtgatatgttttagaaagagttctacaccaagtggctggtttaaaatacccaggacactccagcagttcttaaataactcagaagtatggctttgcagatgaccccattcaacagcattgctatttaacagagaagttaccggtctcttaaaagtaggtgtcttggatgaattttgggtacaaaggaaaaacaaagtaaatggcatagggtcaactcttcaaaaggaaacagtaaaattgtttggcattatccaaggcaatttgggctctgtcagcaatggaaaccagattgtcagtttctgccaattgcacagataagcaatttggacattttaacttaaaatatagaagtcaccctcagactgtatttccaatcaggagctgatttgagtgaaaaccttactcctcaaacttgcatcccctgcctgaatcctgattgaaaacaaacctacatgaaagcaaaatgagcaagcaaccacacgctgggaggttaggtgactttaattttttgtgtatgcagtaagtggcaaactgctcggtgcccatcaaagaaatcacatgcacaactaagtgtcagagacagatcagtctgcctacatgagagaagtgccatttccatcttcgcacagcgagcagcctgactctggttttgctctcaaagcacaacacctgggatagttgcaggactctctgttgcagtattctatgtcctcagatctctcaagctggtctttacatccccagagagtggtggaggtgccctcaggtctaggaatgttaatgctttgggagggctttattaattcatggcctcttggttcaaagatctgcctgatagctagaatagccaaaatgggaaactcactataacgagtctacttagagttgaagaataaaattctatcaactcagccagagagtaccatgtcaaagtaagctgaaatggtgaatatggctctaagatttagtaagttgacagcacaggatttttttggatattgaagtttattttcaatttggctgacccatcagaaatgatcaaatgaaagctacagtaagcactttcattcttttcttctattaaaaatgtttgagtaaattgaacctgaatctaatcaaataaatatgaggattgaagaccatgttagataacaccatgaggatacaatatgtcagatccattatatgggaaattctacagagaaattgacctcgtttcttgaacaaatgaatggcttgggaaaaaaaaaagtgtgtgtagggtatagggtgtgaggagcgggggtggctattatagatttaaaagagactttaggatccttaccataaaatatttagattttaatttttaaaattccaaaaaggtatttttaagacaactgggaagatttgaatgcagactgtgtgtaaaacgacactaaggaatagttcattttgttaggggtgatggtggttttatggttatgatttaaaacwttttatctgctagagtttcatattaaagtatttatgggtgaaatgatacaaaggcttgaatttgttttgaaatactccagtgacggagacattaaggagggtggcaataaatgagacaagattggtaaaatrttgataatgttgaagtaggtgacaggtacacagggaacattatatggctctttacttttatgaatgtcagtgattcccataatataaagtatttctgttttgttttgttttgtttttgagacggagtctttctctgtcacctgggctggagtgcagtggcgcagtcttggcttactgcaaaatctgtctccaaggtttaagcaattctcgtgccccagcctccgagtagctgggactacaagcacatgccactatacctggctaattttttgtatttttagtagagacgaggttttgccatgttggccagggtggtctcgaactcctgtcctgaagtaatccacctgcctcggtctcccaaagtgctgggattacaggcatgggccaccactcccagcctaaagttttaaaatctattaaaaagacagctgtgtgataaatgctgactgatttcatatgtattttatttaatcatcaacaaaacattgttaaatatttttgcctcctcgttgtgtctgatgaacgtggctcacggagtctgtcacttaytcgaagttctcggtgggtrcagaattcaagccaaggcctgtctgattccaaagcttgctttcttttacctcccaattaacatttattaatgattataataatcattgttgccattattaaccttgagaaattaaataattactcatcccaattgtattgtttaaataatagccagtaacaattattaagaagttactatgtgtttttgtaatatattgcatcattttcctctcacaacaccattacaaagtaaagtagtgtatctacccrggcttacttatgctttggtaataaatcactcctaaatttcagtggcttccaataacagaggtttaattatccttcactttccaatgtgggtgcttttctctgggtcttctgctgaaagaatatttcctgtctaggatgttgctggagttatagcaaagggagaaaggagagaaacaggtagtggttctcgaagcttcttcctggaggcaacataaatcccatccgatcccattcccattccctgggctgaatctgtcaataggcaagtttgacatcaacttagtggggaaagagaatcctctcacagagaggggcagcaaatatttgggaacaataacataatctgccacaggcaatatcctcatttcacaaatgaggaagctgaggcatggagagagggtaatttactcatattcccacagctagtaagaggtgaaggtcaaaagtgacccaggaagatgtgggcctcctaggcagcacaggctcacaggttacttggaaatattgtttcctttctatttctatttgcattttttttgcttttattattaacttttgagacagggtctcactttgtcacccaggctggaatgcattggtgtgatcatgactcactacagcctcgacctcctggctcaagggatcctcccacctcagcctcccctcccaagtagctgggactacaggcacacacgaccacgcctggctaatttttgtatatttttgtagagacaagccttcgccatgttgtccaggttggtctcaaactcctgagctgaagcgatccacctacctcagcctcccaaagtgttgggattacagtcatgagccactgctgctggccctgcttttattactatttttaattgaccccataataatcatacatattgatagggtatggtgtgatgtttcaatacatgtatacaatgtgccataatcaaatcggagtaatgagcatattcatcacctcaaacatttatcatttatttgtgttgggaacattcaaaatccattcttctagctatttgaaaatatgtaacaaactattgctaactatagtcaccttacagcgctacagcacactcaaactttttcctgctgtctagctgtacttgtgtgtctgttaaccaacctcttcctatccccccacccccatccttccctgcttctagtgaccactattctactctctacttctatgaggtcaacttttttagcttccacgtagggatgagtatttaaattcttaaattttagattcaggggatacatgtgcaggtttgttatgagggtatgttgaatgatgctgagctttgggcttctattgattgcatcaccaaaatagtgaacatggtacccaataggaagtttttcaacccttgctcctctccctccctccctgctttaggaggcctcagtgtctattattcccatctttmtgtccatgtgtactcaatgtttagctcccacttataagtgagaacatgcagtatttgcttttctgtttctgtgttaattcacttaggagaatgacttccagctctatccatgttgctgcaaaggacattattttattctttttatggctgcatagtattccatggtatacatgcaccacattttctttagccagtccactgttgatgggcatctaggttgagtctctgtatttgctgtggttaacattgctgtgatgaacatacaagtgcatgtgtctttttgacagaacaatttatttttggggaggtaggtacccagtaatgggattgctgggttggatgatagttctatttttagttctttgaaaaacctccaaactgctttccacatggggctgaattaacagtgtattcccatcaacaatgtataagcattccatttttctctgcaacctagtcatctgttattttttgactttttaataatagccattctgactggtgtgagacggcatctcattgtgattttgatttgcatttctctgatgattggcaatgtcgggcattctttccagtttatcggatgtcacttgtatgccttcttttgcctacttttcaatgtgtttttttcttgttaatttgtttaagtttcttgtagattctggatattaggcctttgtctttgacaaaggttgcgaatatacatagcttgcaaatattttctcctatgctataggttgtctgtttagtctgttgatagtgttttttgctgcgcagaagctctttagttaaattaggtgtgaattgccaatttttatttttgttgcatttggttttgagaacttttcctaggccaatgtctggaagagtatgtcccagattttcttttgggatttctttttatagatggaggtcttacatttaaatcttgaatccctcttgagttaatttttgtatatggtaagatgaagggatctagtttcattcttctgcatatggctagccagttttccctgcaccatttattgaaaaggggatcctctccccattttttatttttgtcatctttgttgacaatcagttggttgtatgtgtgcagctttatttctctgttttctattttgttccattggtctgtctatttttgtaccagtaccatgctgtttttgttacggtagccttgtagtatagtttgaaatcaggtaatatgatgagtccaacttcgttctttttgcgtaggattgctttggctatttgggctctattttggcttcatgtaatttttattttatttttatgaattatttattcatttagagacagtgtcttactctgtcccccaggctgaagtgcagtagcatgatcatagctcactgtaaccttgaacttctaaactcaagcaatcctcctggcttagtcctgtgagaggctaggactataggcacgcacaaccatgctcaactaattttttaatttttttgtaaagatgggtttcttgctgtgttgctcagtctggtcttgaactcctggcctcaagcaatcctcccaccttggcctttccaagttttgggattacaggcatgagccaccatgcccagcctgaattctagaatagtttttttctaattctgtgaaaagtgacattggtagtttgataggaatagcattgaatctgtaaattgctttcataagtgtggacatttttaatgacattgattgttccaatccatgagcctggaatgtttttcaatttgtttgtgtcatctatgaattctttcagcagtgttttgtaattctcattgtagagttcttacacctctttgtttacaaatatccataggtattttgtgtgtgtgtgtgtgtgtgtgtgtgtaatgtaaatgggattgcattcttgatttggctctcagctcaaatgttattgatgtatacaaatgctgttgatttttgtacattgattttgtatcctgaaactttgctgaagttgtttgtcagatctaagcctcttttggtggagtctttggggttttttaggtatcgaaccatatcatcagtgaagacagataatttgacttcctcttttcctatttggatgcttttgtttctttctcttgctggattgccctggttaagacttccagtattatgttgactaggaatgctgagagtgcaaatccttgtcttgttccagttcttaggggaaatgcttctaacttttacctgttccgtatgatgttggctgtgagtttgtcatagatggctgttagtattttgaggtatgttccttcgatgcctagtttgttgagtgtatttatcataaggggatgttggattttattgaatgctttttctgggtctatcaagatgatcctatggttttggggtttaattctgtttatgtggtgaatcacatttattgatttgtgtatattgaacaaaccttgtattctaggagtaaagcccacttgattgtggtgaattagctttttgatgtgttgttggattcagtttgctagtgtttttttgaggattttcatgtctatgttcatcaaggatagtggcctgtagttttcttttttgttgtgtctttgccagattttgatatcaggatgataccaaattcataggatgagttagggaggaatcccttctcttagatttttttgtaataacttcagtaggattggtactagcctttctttgtacctctggtaggagtcggctgtgaatccatctggtccagggctttatttggtttggtaggttttttattactgattcaatttcagaactcattattagtctgttcagggttacaatttcttcctgattcaatcttgggagattgtgtgtttccaggaatttatctatttcctctagattttccagtttgttttcatagaggtgttcataatagtctctgtggatcttttgtatttctgtgggattggctataatgttacctttgtcatttctgagtgtgcttatttggatcttctctcttttttctttgttaatctagctagtggtctgtcaatcttgtttttctttcaaagaaccaactttttgtttcattgattctttgtatgattttatttttttgtctcaatttcatttagttctgctctgattttagttatttcttttcttctgctagctacagttacattcttatcaagagattttattttatgccacattctgttggtttttatgaagcaaacattattgaaatgtagcatatgtataaatttccagaatgaaaaaagcttgaaaagaaacatttggtattttctattgctagatggtaaaactagttgtcatcatttcctttcctgacagaagtttggtttatgagccaaaaaagattttgcctaagagctttggtatgtgtagattggccaaacattaagatttaaaatacttcagtcttacttggtacagcacaagcttaggttagttgtgtgaccttggataagaattttgacagctccctctccctctccctctccctctccctctccctctttccacggtctccctctgaagctggactgtactgctgccatctcagctcactgcaacctccctgcctgattctcctgcctcagcctgccgagtgcctgcgattgcaggcgcgcgccgccacgcctgactggttttcctattttttgggtggagacggggtttcgctgtgttggccgggctggtctccagctcctaaccgcgagtgatccgccagcctcggcctcccgaggtgccgggattgcagacggagtctccttcactcagtgctcaatggtgcccaggctggagtgcagtggcgtgatctcggctccctacaacatccacctcccggcagcctgccttggcctcccaaagtgccgagattgcagcctctgcccagccgccaccccatctgggaaggccgccaccccgtctgggaagtgaggagcgtctctgcctggccgcccatcgtctgggatgtgaggagcccctctgcctggctgcccagtctggaaagtgaggagcatctctgcccagccgccatcccatctaggaagtgagaagcgcctcttcccggccgccatcccatctaggaagtgaggagcgtctctgcccggccacccatcgtctgagatgtggggagcgcctctgccctgtygccccgtccgggatgtgaggagcgtctctgcctggccacctcgtctgagaagtgaggagaccctctgcctggcaaccgccctgtctgagaagtgaggagcccctccgcccagcagccgccccgtctgagaagtgaggagcccctctgcccggcagccaccccgtctgggaagtgaggagcgtctccgcccggcagccacccgtccgggagggaggtgggggtgtcagtcccccgcctggccagccgcctcgtccgggaggtgaggggcgcctctgcccggccgcccctactgggaagtgaggagcccctctgcccggccagccgccccatccgggagggaggtgggggggtcagccccctgcccggccagccgccccgtccgggaggtgaggggcgcctctgcccggccgcccctactgggaagtgaggagcccctctgcccggccaccaccccgtctgggaggtgtacccaacagctcattgagaacgggccatgatgacaatggcagttttgtggaatagaaaggggggaaaggtggggaaaagattgagaaatcggatggttgccgtgtctgtgtagaaagaggtagacatgggagacttttcattttgttctgtactaagaaaaattcttctgccttgggatcctgttgatctgtgaccttacccccaaccctgtgctctctgaaacatgtgctgtgtccactcagggttaaatggattaaggacggtgcaagatgtgctttgttaaacagacgcttgaaggcagcatgctcgttaagagtcatcaccactccctaatctcaagtacccagggacacaaacgctgcggaaggccgcagggtcctctgcctaggaaaaccagagacctttgttcacttgtttatctgctgaccttccctccactattgtcctgtgaccctgccaaatccccctctgcgagaaacacccaagaatgatcaataaaaaacaaacaaataaataaataaataaataaataaaaagaaatcttgattggaaaaaaaaaaaaaagaattttgacagctctacacttcaggacctcatagacaggatggggatagtagtaagtaccttattcaggttgttgttaggattaaatgatgtgcttaaagtggctaatgaggtttctggaatatgatagacataaaataaattgtaattactattactaaattagtttgagtggctaggaaaaggtttatttsaagatatagtatttttaaaagatcagatacatactgtagaataatttaattatatggcttttattttatacagcatttttaaggatgatgaactaaacttaagtctatttcaactttcttcacaggttccgacacaaaaaggactgtccatgaatttattaatgaccagagagacaggtttctgctcgaggtagtaaaaataacttttctcccctagccaagtggaagacttctttcatagtgttttcaaatatttaccttgacattttgcttgtctattacatgtcccaaatctattggttgaacaggttggttttttcacgtgttcattaatttgaaaaatacttacggagagtttactatgtgccaagcagtaaacaaagcaaagacctgcctctcaaaggatttacattctaatatcccagacaaggttttatacttcctggaacctatcagaaaaattattctagaaaatgtctggttctagtttgtccctttttctccaattatctcttctatgaccaggatagtgcctgagatgccctatttaatgcagcttctcctgatgctttggctgaagatggtgggaatccaagcactctggaaattcagacaattctagaatccctccagcttccttgatacctattcatgtcagaacagtgtgccaggtcccttrtggagtcttttataaaaaataatagaggctttttttcctgccatcaaaaactttagctagatgccaggcatataactgaaaacatgattatttgctatgtctatatgcatattcatttgccatagataaagcagagatgccaagcacttaatgggaaaataattacaaaatgaatgaattgaacatttttatacctttattgtcaagtatctaataatctaaagatgttgatgtgtctcaattaaactctttgatgctaatgagtaaataacaatgtacttgacttttcctaatttcacatcacacattttggggcataaatttagttagttagtacttccatacgctgccagctgcaatcaacataaaatatctcacttaaagtaactgataaagttataaatagaacctgatggctttgtttgttaaaaagcatttcctgggtgtgagtttgatctttattataaagtcctactgacataactgatgtcctaggtagtttaaggtggtgcttgacagatacactaggatttcaggacatttatattaaatatacctcatttcctttctttactatatccctccctccctcaaccagtttggtgaagtgtccacttatcaaaaagacttgtacagtctaccctctgtatccacaggttcagcatctgagaatttaacaaactgcagatcaaaaatattcagaaaaaatgataaaaaataacaacaaaataatacaaattttgaaaaattataaagtataacaactatttatatatagcatttacattggtattaggtactataattaatctacagattatttaaagtatatgggagaatgtacatggttatatgcaaatactattccattttacataagcgacttgagcatccacaaagtttggtgtccttggggatcctggagccaatctcctgttgatgccaaggaacaactatttgtagtaaaaaatctggccttgtccagaaagagtctggcctttgctcttgacttccgggtggtaatctatatcatacttaatcaggctgtctttctttaatatagaactggtcacatctgacagtcttagggtggaggctgcccatcccagaaatattaacaatgggacttagaggtggggctttgggtcacactcagagggtctggagactggagacagatcaaccacatggtcaatcaattaatcatgcctagttaatgaagccccagtgaaaactctagacactgaagctcatttctgcttcccttgttgacaatattctctgtgcgttgtcacatgtagatgcagggaggataacacctcctagttccatggggagggaacactggaagctttgcatttagaacttactcaggctctgccttatgggtctcttcctttggatgatttcaatgcatattctttccttttaataaactatacccatgagtataatagctttcagtgagtttgtgagtccttccagaaaattatcaaaactgacggtatttgggggaacccctcaaacttgcggtcagtgtcagaagtgagagcagtcttggggactatgatatgaaattttcaatttggctaactctgggtaacttgtaatagttttcaaaaactgaagtggcttcatggcatctttatttttttatttatagcagagttgggacatgaaatacccatttaaaaattattaacattgacatattatgaatttaatattataaacactttatgccaataaatttgacaacttagatgaaatagattccttgaaagatgcaaactaccaaagcctacccaagaagaaagaaataaatggtagctttatgtctcttaaagaaattgaacttacaggtaaaaaacttctcacaaagaaaaacccagatttattggttaattctgccaaatatttaaagaagaaataaatttaattttatacacactgttccaaaaaaatgagtaagaagagggaatacctcacaactcatgctgtgaagccagcattaccctcatatcaaaactagataaaatgattagaagacaagaaagctaaagaccaagatctctcgtaagcaaatatgcaaacattctgaacaaaatgtaacaaaccaaatccaataatactaaaaagataatacattatgacaaattagggtttaatctaagaatacaaaagtaatttaacatttaaaaataaatcaatgtaatacacattaacaaattaaaaatgaaaacccatatgattatcccaattgatgcagaaaaaccactcaacaatatccaaaattcattcttgatggagactctcagcaaagtaggaacagaagagaagttcctcaactttataaaaggacatctactagaaacttatcactaacattacatatctaatggtaaaagactgaatgctttccccctaagattaggaacaaggcaaggatttccactgcaccacttctttttgtcagtgttctggaggtcctagctagtgcaataagacaagaaaaaaaaatgaaagacatttagattggaaatgaagaattaaagctgtctttatttacagacaacacgatcctctctgcagaaaatctgaagaaatctattttaaaactaccataacctatgagtttagcaaggttgtagcaaggtcaatttacagaaatcaattgtatttttataaacttgtaatgaagaattaagaaactaaaatttaaaaagcaatgccatgtccaacagcatcaaaatatgaaataattctagatatgtttgtaaaatatgtacaatagatgtacactgaaaactacaagacattgcagagaaaaattaaagacctaaataaatggagagtgataccatgttcattgatccaaagactcaatattgctgagatgccaaatctttccagattggtttatagattaaataatttatttaatctataaatgcaatctcagtacaaatcccaggcgtctttcttgtagaaattgaaaggctgattctaaattttttatggaaatgcaaaggacctagtttcaagagctatgaaggatctaaaatgctatcctacttgcaagctaagaagttagtctgctgcagtttcatagtttcaatagaagacaccagactcctgggtcagaaataaagaacagtttcttatttatagccattccactcctgggaatttatccaagaaaaataaaagcatatgtgctcatagcaaccttatttgaagtagcccaatgtaggaaacaagcaaaatgtccatgaacaggtaaatgggtaaccaaactggggtatatcaacataactgattactactcagcaataaaaaggaattagttatggatattctaccaacatggatgactcttaaaatagttgtactaagtttataaatccagacagaaaaatagttcatactataatttcactagataaaattctagaaaatgcaagttcgtctatagtgacagaagacaggtcagtaattgcctgggaaaggaggtggggaggagggaagaagggatggattacaaagggcttgagtagactttttgaggtgatgaatatgttcattgttttgattgtggtgatgatttcccaagtatatacatatgtcaaaacttaacagattgtatactttaaaaatgtggagtttattggatagttatacctcaattaaactagaaaaaaattatgaaaatgattctacaattactgatcttttctaattattatttttccctctctgctggattattgccaccaacatacaaacatcctattatttaccccatcttttaaaacaaccccaccccaaaaaccctctttagatatcagtttggctaactctgggtaacttgtaatagttttcaaaaactgaagtggtttcatggcatctttatttttttatttatagcagagttgggaccctctttagatatcacattacataccatcttctgccccaattttctgctctcctttatagcaaaatttttcaaaagcattatacttatttcctgcctccacttcttctctccctattctctgctaaatccacttccatcagggttttgtccttatcattcaccaaaacgacttttgtcaaagttaccagagacttctctgttgctaaatcaaattgtcacagtattccttttatttaacacttggcctttcagcagcaattggtctattcacaccttttttgaaatactatcttctgtgggtttctgggagccactctctcgactcttccaccttgctaactgctgctgcttctcagttttatgtgcttgttctcctcttctccctgatcttcaagtgttggaatgtccagggcccattccttaccctttgctctgtctaccctccttcaggctcatgtcttcgaattccacctccatattaacaacttccaaatttatttctctagcttgatcttcttccctgaactccaggctcacagatgcaactgtaattcttaacatttcccatcgagatgttcaataaccatttcagacttcatgtttcctaaactccgcccctaatatactctttcctacccctgcaagtctgtatctcataccatagtccctggctcactaaatagcaattccatttttccacttgcttagaccaaaaatattggggttatccttgactcctttttacaatccacatccaaacagatcttcaaaaatattctttttcaaaatatatccataatcagactactgttcatgacctccacagctactactgcagtccaagccaccaacatctctagcatgtattagggttataacttctaaacctgggtctcctgcttctactgttgctcccctgcagtctgtctgttctccatacagtgataggatcatgcccttcctctgccaaaggcctctagcgacttgatctggtccccagcttactctctgacctcactcctatcactctttctcttgtcccaaaagacaacgatccaaaatgccataatcccaaacactgaaatcctgaaagatcaaaatctcaaaaatatagttctggaaaatgtaaacttaaaacatttttaaaagatatttatttatttatttacatttttaaagggggatttttttgagaacatataacaacatgacagaccacctgttaagccactttgcacaatgaagtaggcaataacagcaacatatgtatttttgccagtacaaatactcaggcattctaatgacaattgcacaggtgtaaccattatgagcagactaactatatgcagaaagaaatagatccaaaagcaaaatgtataaatgaatattgctatggttggtaatttgtgcacccagctttacaactgcagtcatcaaataaactttatcaataacacgttgaaatttttttagaagtctttgatcacccctaattccaaatctgtcattatgtcaacatattgtttggagactcaactgaaatccgttttcgtctgaataaagacgataacaaggtaatagttttgtctaacatgatgccactatcctgtgattttgattttcaggattttagacattagggattttagaattttgatctttcgggattttgacatttgggattatggcattcagtattgtgtattagggattatgattcaaaccctttctcttgctcactctgctccagccttggtggtctctttgctgttcctgggacacaccaatcactctcttgtctccaggctgatgcactggaggctcttccttatattaggctggtgcaaaaacaactgtggtttttgctatttcaatggcaaaaaccacaattactttttcaccaacctaataggaggaacattcctccctcagaaatcctcatgattggtttcctacttccttccagtctctgtttaattctcaccacatcagggagactttccttggctgttctatacatgatagcaaccccctgcccttgtccacagcaccccatcccgctttcatcagcttccttcctcttctagaatggacactccatacaagcatttatgtttctttggttcatcactctatttacaccccttaaaacagtcctggcacacagtaggcactcagtaagtacttgcggaataaagtaatgaatgaagcattttttgctataaacttggagggtctaattattggttgttatctctttaaaatcatctcatttccatattttcaattcatttatattatgtatgtggccttatttatgatttawttttttcctgcatggtattaaaaacccaaataggtctgggtgtggtggctcacgcctgtaatcccagcactttgggaggccaaggcaggtggattgcttgagctcaggagtttgagaccagcctggctgacatggcaaaaaccatctctactaaaaatacaaaaatgagctgggcatggtggtgtgcacctatatagtcccagctacttgagtggctgaggtgggaagattgcttgagcctgggtggtcaaagctgcagtgagccaagatcaccccactgcactccagcctgggtgacagagcaagaccttgtctcaaaaacaaaacaaaacaaaaatcaccacatggactyttatattctgtactaaaaaaatagaaggaactagaaggcagatgtcaaagttgtgtttggggatctaaacaggcctctttgattacagttagatgtggtacccttgggctggctcccaggaatgcatcactggcatggcagagttgaaactgctttctcccatggtcttcctattggaggagaagctggtagcttttgtgactgcagacaacccagtttcccaattcccagaaagtactggagggtaatacactgtaggtaataccagatgcacctgctctttggaggaatatgcagctattttttatttgtagggcagagcccttttggaacaacactgaccctcttcatagaagtaagggagggaaattagtctcccctctaattatccctgaaaataaaactccttcaagaaataaagtccattgctccaagatttaggcgtactattatttctaatacaaatgytcacttgctgtgtataagactgttgaaattactaaaaatgtggaatcatgtttttacacctctgtcttcaatgcccctagtatgctttgtcaaccaaaagaaacacaatcaaaaagtttgaaaaagacatagcaatgagggaacggcaactaaaaaaagcagagaaaaagctccaagatgatgcactggcctttgaagagttccttcgagaaaatgaccagagatctgtagacgctctgaaaatgtttgtttcatcactctggccaaatccttcccacctcttttgtttgtttgtttgtttgtttkttkctaagaagcaaattaacagatcttcattgcttttcagggcagcacaggaaacaataaacaaactccaaatgacagcagagctgaagaaagcaagcatggaggtacaagcastgaaaaggtgagggtgggcacaatcttctygtggccaaatttccacgacccattaaaacctattcatgccaggtaagacctaataatcctgatcatccttatcagttgatgatgtcataagtatgaacgaattttaaaaaataagtaacctgtccatcaagatttgttcctgcctgggtatcaggacagtatgtggcttccggttggaaagtctctctaacttgtagatacagaagcaaagaagttagatgaagcaaaacaattaggaataaacaataaattattatctaagtgcccttcctcattcattcatttttttctttttatatttttagtttagtctggttgcacttttgcattcattctgagacattttttcccccacattttaacatctctgaaattgggactcattctacgatcatcttacagtcatcatgggcagtattttttatatttacgcttacatagtrgaaactagtattgctattaaaaactaagatctgctgggcacactgcttgcctctcagctcctttggaagctgaggcgggaggatcgcttgagcccaggagttcaagtgaagtcttagcaacacagtgggaccccatctttagtaaaaataaataaaaataaaaaactaagatctataaagagaaaaaagcattggagcaggagttgggataaaattgtaccatctgccactctttttcaaacttggatgtttccttctatggtcaaggaaactcacttgaactaatttttttttttttttttttttttgagagggagtttcacttttgttgcccaagctggagtgcaatggcatgatctcggctcactgaaacctccacctcctaggttcaagcgattctcctgcctcagccacttgagtagctgggattacaggtgcccacctccacgcttggctcattttttgtatttttggtagaaatggggtttcaccacgttagccaagctagtctcaaactcctgacctcagacaatccacccacctyagcctcccaaagtgctgggattacaggcgtgagtcaccgcgcccggcctaactaattttaagtagctaaagaagcttccttctgtcatcatttttggacagtaatttcatgattcagaatacactgtagtgttggtatcaggtcaatgctaaaacttacttttcctttttgagaacttgatgcttacctcccctctagaactaggtcctaggcttcttacatccttcagacaagcgagtctgaaataaagcagagttggtttctctgaaaccaactgcactaacagaatgtgcatttcatattctggctacagcaggctcttctattttaggagcctaaagctgaagctgctccaagatggagaatttccttctctctttcacccccgatgcaattagaagtttctatccatttatagawtatttctagagctagagtagcagcctctatttttgtgcaaagtattgcatttatgcacaatagccgccgagttgagccctccaaatggtcttgctgaagataacttgatcgttgatgtatcacatcatctagaaaggtgcaggagatcatgaaaaacaagcctgtagtggagcaagggcagcaggtgctcttctctctttatggctcgagatggccccaggaggcctcctctacgggtagggctggaaagggaagggggcatcttctgaagcttttgcttggaaactgtatctttccagccaattgtcacctcgtgttctttgtagcatatctgggaggatttcaatctaaaacggaggcagcagtagaatgaaggtctcccatcaatcttccaactggtgatacgtgaagcagccatttactgacccttgaatatcactcttgcaccagggctgaaggaaggctctgacagatagaagtattaaagctgaaaacattgatacaaagtaatattgatatctttcagataaaggtttggaagctccctttcaagtgggccttcttttgttattttaacatccctctttgtccactttgtaatgtaattactataacgcaatgtgaagctgggcaaaagcttttggtccaagtcactcaatattggcaagagcttgggcatctgagtcagatggacctaggtttgagtgctggctctaccatttacatctcctttccaagataagaataatagtacctattttaaagtgctgtcctgaggatcagcctatgtctgtagtgtgtcctgcctgtagtaataggtcctcattaagtgttagtttctttcttttccttacaaatgtaccatcttttgctactttcttttttttttttttttttttgagacagagtcttgttctgtcgcccaggctggagtgcagtgacgtgatctcagctcactgcaacctctacctcccaggttcaagtgattctcctgcctcagcctcttgagtagctgggattacaggcatgcgccaccacgcctggctaatttttgtattcttagtagagacagggtttcaccatgttggccaagctggtcttgaacccttgacctcatgatctgccctccttggcctcccaaagtcctgggattacaggggtgagccaccatgcccggcttttttttttttttttttttttcgagacagagttttgctcttgttgcccaggctagagtgcaatggcacgatctcggcccactgcaacctctgccatccgggttcaagcgattctcctgcctcagcctcccaagtagctgggattacaggcgcccaccaccatacctggctagttttttctatttttagtaaagacgggttttctccatgttggccaggctggtcttgaactcctgacctcaggtgatctgcctgccttggcctcccaaagtgctgggattacacgtgtgagccactgcacccggcccttttgctaccttctaatttctccctatatctaaaacttaatacagtgtttcctacagaataataaacaagtcgagtaaaactatcatgtctattctatgtgtgcatatccttggacatgttttatttaaacagcattcctagagttttccttcatctcatttcatattcactgaagcccatatttttatggccatatttatcctttttgataattaaattattaattcagtacataagagaaacaatttyataaaaatttttttctaatgaatgtgctttcacactgatatacctaatcatatctttgtttcttttgagtagtgaaatagcaaaaacagaattcctcctcagggagtatatgaaatatggtttttttctgctgcaartgtctccaaaacattggcaaatccagcaagcactaaaaagagcacaggcatcaaaaagtaaagcaaatatcatccttccaaaaatattagcaagtaagttacttatactcaactttcatgaactaaatatccctaactctaaaatcatctgcttcaatgttttttatctaaatagatatttttttaagcaggatctaaactaagattttcactatctctgttattgtatatcattaatttggaaacttgagctaatttcagatataaagtgtctytgcctatttatgttgctgtagaggaatacttaaggctgggcaatttataaagaaaagaggtttatttggctcacagttctgctggctgcacaagaagtgtggtgccagtgtttatttctggtgggggcttcaggctgcttccactcatggcagaagggaaacatgtgtacagagaccacatggtgcaaggagaagcaacggggaggggaagcaggtgccaggctcttttcaacaaggagctcttgtggaaactaagagagtaagaactcactcattcctatgaggattgcaacaagccattcataaggagtctacccccatgacctaagcatctttcactaagccccacctctgacattggggaccaaattccaacatgagatttggagtgtagcataaagcaataaaaatatatgcatggggaaagagaaaatatattatttgcaactgatatggtagccatacctagaaatcccctctaaaaacctgagagactgtttgattttattaaaggattctgtaaacagacacaaagtcattcatttttatttttattttttgttttgtttggttttgttgttgtttttgagatggagtctctgtctgtcacccagagctggagtccaatggcacaatctcagctcactgcaacctccgcctcccaggtttaagatattctcctgcctcagcctcctgagtagctgggactacagccacgcaccaccatgcccagctaatttttgtatttttagtagagacggggtttcaccatgttggccaggatggtcctgatctcttgaccttgtgatctgcccgcctcggccgtcatgttttattaacctaacaaattaacctaagttttatgttttattaacctaacatgttatgttttatttatatattaacatatttttatgtatgctatatatatatgttatttacttatatattaacatatttatgttttattaacctaacatattaacctaagtaaactaactttattaattagaaaatacacaagaaggtgggacatggtggctcatgtctgtaatcccagcattttgggaggccaaggcagtcagatcagttgagcccaggagtttgggaccagcctggacaacatggcaaatccccttctctacaaaaaacaaaatattagctgggcgtggtgatgcacacctcccagctactcaggaggctgaggtgggaggatcacctgaaaccccggaagttgaggttgtagtgagttatgagcatgccactgcactccagcctgggtgatgggagtgagaccctgtctcaaaaaagagagaaagaaagagagagagagagaaagagagagagggaaagaaggaaggaagggagggagggagggagggagggagggagggagggaaggaagataagttaaatctaagaaaacctgtctcaaaaaagaaggaagggaatggaatggaagggaagggaagggaagggcaaaggaagggaaaaggaaggaaagaaggaagaaaagaaagaaaatatatgaggaaattaagtctaagaaaacaacaataaccttaatgtgtgtgagctggagttttgagaaatagaaagctacgtcatgttttcagatagaaagattgatattgtaaagttgccaaatattctaaaactaatgtataagttttatggaattataattaaaatgttaccaaaaatgtatcagagaattgggtcttggttggggagaactttgcacaatgatccaaaggttcatctagaaagataaacaaatacttttgaattcggaaggtaatgggaggaggattacaaatgctttaaaattttatatattatcatggagtctcagtaattgaaacagtcatgtactggcattgggtcagctcaacggaccagatatgggtcccactacatatatatataagaatttaagtccgggtgtggtggctcatgcctgtaatcccagcattttgggaggccaaggtgggtggatcacaaggtcaggagttcgagaccagcctgaccaacatggtgaaaccccgtctctactaaaaaatacaaaaattagccaggcatggtggcgcatgcctgtaatcccaactactcagaaggctgaggcaggagaatcgcttgaacctgggaggcggaggttgcagtgagctgagatcacaccactgcactccaggcagaccctgtctcaaaaaaaaaaaaaaaaaagaatttaagccaggtacagtggctcacatctgtaatcccagcactttgggaggctaaggagggaggattgcttgagccaggagaccagcttgggcaacatagtgagacatagtctctacaaaaaatttaaaaattagctgagcatggtggcatgcaactgtagttctaccactagggaggctgaggtgggaggattgcttgagcccaggaggaggaagttgcagtgagccatgatcatgccactgcgctccagcctgggcaacagaacgagaccctgtctccaaaaaaaaaaaaaaaaaaaaaargattgtaataagtgaaagcggggtcacaaatcaaaggggatgatttgcactttcaactaayattggggtaaccaggaccagacttagcctcttgcctgaaaaactggataaatacatgaaacaggaattttcagacattggacatcaaacagtaaagcagagtgagactccgtctcaaaaaaaaaaaaaaaaaaaaagcagagtgatcccttggagaggggaaaccagggaggtgagccctaggattgcctcagcttactacctggagagagagtttccaggatgcagtgcagggatgggagccaggggcagcccagctgagaactgatgccactactccaggataggagcatttacaacacagaaattggcgaactacaaatcagggggaatttgctttctagagagttggttgttaaacctttaccaacacaccactaatggtttccctgctgagttccctaggtctctcactgtgccaagtgtgattaaattaggtcatatgtgtaaagtgttgagcacatgaaaaaatttggttaaagctaaatggtgttgcacaagagggaaaacaagtgggaaaaaaaaaacaagaagtatttgcattcaacaatttaaaattcagtccttctggggccaggtgcggtggctccatcttgtaatcccaacaatttgggaggccaaggcaggcggggtgcttgagccgaggagttggagaccagcctgggcaacatggtgaaaccccatctctacaaaaaaaatacaaaaattagccaggcatactggtggacacctgtagtcccagctactctggaggctgaggtgggaggatggattgagcccaggaggtcaaggctgcagtgagctgtgatggtgccactgaactccagcctgggtaacagaacaagaccctgtccccaaaaaaataaaataaaataaaaaatttcatctcggttcatgatccaaatagagaatgttcagaaactagttaagtctgtcagtccagaggcttgaaagctaacatttgggatttaaggagttacgacagatggatgttgaaaatggagatgtcctagtgccctaccagtcagttctcacacattctcttaacccagggaccagcccttactatctgcatattgtgtttgcatattaccatctgcatattatgtttgcatattactatctgcatatcacgtttgctggttgataatgtctccaacttatatttctgtccctggaagttttgacaataactctatcttcaccctgagacaaagctctctttctcagcagtgtttttttccccccatctttctctgtctctctcctcttcatttgccatttctagaattatcattacattcaagtaacaaggaaggcatccttgaggagtccgggaggacagcygtcctttcagaagatgcttctcagggaagagacagccaaggtaaaggtagatttgggactcatgaaagtaaaacctgcgaatgtgtccatctcaaagtggagacagaggactacaagccaacctggaaaatggagggctgtgtccaccccaccctcaatcctagcagccaggggctctggttctctctctcacgttatcacaaaatgccaagaggtgcacgagtggatagaataggcagagaatcagaggaagagggcccctgagacataccctggctggccagcacatgtcctgaagtccttccaagctgaggcccctcgtttctctggcgcggacctgccttctgccgttggcaggcccactcccagggtccagaaaaccaggccatttgcaacgaggtgactgactttggccagtgattcagagaatttacccttgggaaaaggattaatttagagcagaggtagctctaacctacccaccatcaactccaagaagtccttcactatcaccatctctcccaggtggaatgaccctcctcctcccactctgcatcacaagttcagaccggagatttggcccactgggctgcgctatctggccccagtgttttggtgttgtttggcttggtggccaatgtttaaaaatcagcacatgtaggccaggcatggtggctcacacctttaatcccagcactttgggaggctgaggcaggtggatcacttgagcccaggaattcamgacaagcctgggcagcatggaaaaaacccatatctgccaaaaatacaaaaattagctgggcatggtggtatacgcctatagtcccagctgctgaggaggttgaggtaggaggatcgcttgagcccagcaaatcgaggccatggtgagcagtgatggtgctgcaccactgcactccagcccgggtaacrgagtgagaccctatgtcaaataaataaataaataaataaataaagtaaaataagcatatgtcatgaaaaaaatctgtatttctatcttctcttgaaaaccacaagatctgaagtctgggatcaagttgggaactttcttgtgggaggggtctgatctctccagttgctttgttcttactgggtccactccactcctttacctgcccttccctgtatccatctgagtttgcagcccccaattcaggytgactcctggggactccttttctcctgtatcctgctatcaamcttgggatgtatttagtattgggataaaggtcaggaatacaagttgcctgcccagaaatgaccctggtataagcctgaagccttgtgcatctggccagctgattgaaaagtaaattcttttgtgttgtgaggccactttggctcactttaagacatactactttgcctgttggaagatcttgagtagggtgtgggggcaggggtggggtagagggagtgggaggtggtgtcaatgttcccttctctttgaaattttgaatatagaagtttctcagtttaaataacacctcttaacaatactttttagtagtacatgttagggtaccagcttaaaagctgagacagrccgggtgcgggggctcacgcctgtaatcctagcactttgggaggctgaggtgggtggatctcctgaggtcaggagttcgacatcagcctggccaccatggtgaaaccccgtctctagtaaaaatacctgtaatcccagctactcgggaggctgaggcaggagaatcgcttgaacctgggagacagaggttgcaatgagccgagatcatgccattgcactccagcctgggcgacgagagtgaaactccatctcaaaaaaaaaaaaaaaaaaaaaagctgagacaataataataataagatggtgatggracccatctgattggttcttcttcatccatttttttccccttctttcctttactcaccgtgtatttattggagacataaatgtttcaggtgctcttcaagaccccacgtacacaaagacaaayagtacatagttctgcatcccagaactacacactacaatggggcgaatgatatatagttatagacagtgagggctctggagggaaaagccaaaagtgtgatctctgcctgaggcatttagaagagtctgtgcctttcattttattcttacgcatgcaactcagtttcaatagaataaaagacctccattttctatgcaattatcattccaataataaaataattttttaaaaaaagaaagaagtaatgggcatgtctgtgcagaaaaatgaataccttgcaccaagtgcacgggctcatttctaattccatgttatttcttttcactccaccatcaccaacggcatggcctcacctggacattttgaacaggaaagccaagcagaagcctgactcgcactccagagaaaaagaaatcaaagtacagtatatacttgactaactcccttggaaactgggaatggttttcagcaaataacttttaaagccttttctcaacatatatgtcatgtacccataactgttgtaagagatcctggaagtagtggtgccatttctgtgcactcctgagatctcacaggcctctctccaatctttgttaagtacctacagctattatttgcagaagctatctgccccgccccctgcatcttgggtctttgcttctcagaacccactgccctattttttattaagctattctgctagcctgtgtgtttgcaatttcaccatgtgattcaaaattcctgcaattaggatcataaagtatttttttgttgttgttttccccctcacttaattgttcactcatttgtactcattatttcagaagtcactcgttctcaacccttactaccccaagagagcttctttaagaaaatatgttgatgcctgggatgggtacaccagcccagaggaagggatctgggccagcatcacagtatcatgacaatcactgagagaaacggaaacattttgctgtgaattctaggcaccctctgaattctagacacccacttctgtggcatttggcacagatttttttgtaattaaatgttcattttgagatcgttttagattcacgtacaattgtaagaaatagtacagagagactccatataccttttactcagtttcctccaatggcatcatcttgcaaaactgtagcacaaataccataaccaggatattgacatggatgccatcaaatacagaacgtcagcgcagggttcttcatgttgccctttcagagccacacccacttccctctcccacctccccttaaaccctggcaaccgccaatgcgttctscatttctatgattstgttattccaagaatgttctataagtggaatcctacagtatgtaatcttttgggattgggttattttactaagcataattctctggagattcacttaagttgtttggtctatcagtagttggatcctttttattgatgagtagtatactatggtatggaygtgctacagtttaactatttgctcattgaagrccatctggattatttttagtttggggatatagtgaataaagttgctacaaatatctttgttcaaccttttgtgtgaacataattttcacttctctggaataattataatgtaatgcctgattggatggtagatgtgtgttcagtggtttttttttgttgtttgtttgtttcctttttgaaatggagtctcgctctgtcacccaggctggagtgcaatggcacagtctctgctcactgcaacctccacctcccaggttcaagcaattctcttgtctcagcttcctgaataactgggattacaggtgcctgccactacgcccagctaatttttgttatttttagtagagatggggtttcaccatgttggtcaggctggtctcgaacttctgacttcaggtgatccacatgacttggccttcaaagtgctgggattacaggcgtgagccaccacgcccggccgcatgttcagtttttaaagagattgataagttgtttctcagagtggctatgtcactttacattcccactagcattgtatgtggggtccagtttcttcatatcctcaacagcatttggtgttttcactgtcttttattttaactattctggtaggtattaattgattttcctagtagctaatgatgttgcgcatcttgtcgtgtgcttgtttgcatctttatatcctctgatgaaatatctattcatgtcttttgctcactttctaactgaattgccttttattaaaactgttgcattttgaaaattctgtatatattagatactagtcctttggggatatgtggtttgcaaagaatttctctgagtgtrtagattgtcttttttatmctcttaatagggtcttttgcagagtgaaagttttaattttgatgaatttcgrgttatgaattttttcttttatagttcatgcttttggtgtcaattctaaaacgttttccctagccttagactcaaagatttttttccatattttttcttaggtgttttatagttttacatgtaagtttgtgatccattttccattttgagttaatttttgtataaggggtgaggtttagattgtggtgatggtgcttttttgcctgtgtatgtcaattgctcctgcaccatttgttgaaatggcttctttcattgaattgcttttgcacctttgtcaaaaatcacttaggcatatttgttgggggctatttctggattctctattctgttccattgatctttgtggctgtcctgccacatgatcttgactactgtagctattagttttttgtttgtttgtttgtttttagtataggcaagctttattatgtatggccttgatttcacaaagttagaatagcaattacacttaaaattaactcattaaaaggtgtaaatatcacagtatagatatgttatccaaaactccaaaggtagtgaaactggtaacatactgctacttatctttggacagatacaaccatagtattaatggaactggttctcagacaagtatgtactacttgctcccgtgccttagggaggataggatgttataacataggcattattgatgcagtgactcgtggatagttgctcctaattaacactgctaaaattaggttcacatgttttactttgtgtgggagctgatgactcttgttcttctatgttttgagtgatatctttcaaggtgttgacatcaaatccactcattccaaaatgcatcacagatgggaacttaagcctctttacaaagcaaaccactggaaatttataggtagtatgcagcactggtctgtaactgatctctgataatatagcaacatcatttctttggaacataattttcttgatcccacaagaagtgacaggataagaaaactcatagttaaatggcaacagtcttgttacaggacagttatctcccaggtgtatgtcaccagttttaatttctgagttsttatcaaagggccttattttcattctaacaaccaatcatcagaacacattgaaactattgcaagtcagacagtgacctaagccatcagcagtcaactcagtcattgctgcagtccaaacagtgtcttctttatccactgaagatctgtgtcttaggactgggtcgagtccagaagaattccaaaacaatagagaaaacaggaaggacccgcctaagggcacagaggtcttcattgctccagattccaacacacaacacagggaacaggaaatggcctgtagctattagtctcgaggtcagggagacttcttatgtaattcctgtttttcaaaactgtgttggctattctagctcctttttctttttatataaattttaaaataaccttatctatatctacaaaaaaactttctggaattatgatgggaattgtgttaagcctttttatgggttgaattatgtcccccacaaagatatgtagaagtcctaacccatggtactatgtacatgaccttatctggaaaaaatatatatatttttattacacctttgcagacttaatcaaagtaagatgaagtcattagggtagacccttaattcagtatgactggtgtccttacaaaagaagagacactgagacacagggagaatgccatgtgatgacagagacagagattgaagtgatgtggctgcaagccaaggactgctggcaataggagcagctaagagaaaggtattaatagattcttccctggagctctcagagagaacatggcctgttgacaccttgatttctgacttctagcctccagaactgtgagagaataagttactgttgctttaagctgttgtttgttacatcaaccctaggaaactaacacaaacctgtatatcaatttggggataattgatttctttactatgttacattttccaatccataaacacagtctgactctccatttgtttagatcttctttgatttcttcagccttctgtagttttcagcttacaaatcctatacatgttttgtyagatttatagcaaaatatttttgtcttttctttttgaacaattgtaaatggtattgtactttgtattttggtgtccatgcagtcattgctaatatagagaaatacaattgattgtataccctgaccgtactgaactcacttattagttcaagaattttgttttgtttttaaagattcctgtggaytttctaagtagaccattatgtcatttgcacatagcgacagctttatttcttcctttctgatctttatgccttttatctctttttcttgctttattgcaatgggtagaacttttgatgttgaataagagtagagggagcagatatctttgtcttgttcccartcttgaaaggattcrgtttttcaccattaaatataacgttagctggaggatttttgtagatgtgcatactctatcaagttaagaaagttcttctctgttccagttttcctgagagtttttatcaaaatgagtgttgaatcctgccaaatgccttttctgcatctagatrctcacagtaacatgcagacaccacattcgctccctcagaaagctcaccactctcctagtctcatccattcattcaacaaatacttattgagtgccccaacaataaacaaaagataatctctgccctcaagggccttaccatttagggaggaagacagccaagttgattgcaatacaatgtgataatgttattagaaggataagcccagagtgccacaggcatgcaaaggtaggactcaacccagaggagaggtgagggcatgggagggcaagggcaggatcagtgaatgtgcttcagaacaggatgcctctaagctgagtctataagaggaggaagagttagtgaggacaagctctggaagagggrgtgctttctggtacagagatgacagagcttggctctgttcagaatggcaggtttatcattctgggtaaaagggggagaggctcaaggagtacatgggcactgcaccatgagcagggaagtggtgatgctatctacctaagcagcctgtgctttgtcccaagggccctggggagacactgtatgttttaaacaagagtgtgacagagacccaatcctatttgcactttagaaagatggatgtggcagtattttagagaatgaaatggtggaggacaaaactagaggtacagtggccagttaggagtctattgtcacaattcaggtgagagagattggactgcctaaaccagataatggcatcggaaacaaagaaagaaaggctgtgagagacatagggaagtggcactgacaggactttgaacggcttatgtaaagattgagggaagtgtcgggaaaagagagtggttacagataacgcccagatttctagcatggcaactgggtgcatggtcttgccatccaataatattgggaacccagtaagaggagcaggcctgcctgaggagaagagaaggagtgtgattttggatgttcattttagctccctgtgggacagccatgtgggtaatgatgtccagttgaaggttggacattgaaatctaaagctcaagaaagagatagagatgtgagagtcattagtgtattagcagtggttgaatccatgagatggatgaggtctccccaaaagaatgggtagaaggagaagggaagaagactgaggaggagccccaaaagaccacaagagtatcagagaggtgggaagagagtgattagaaagtgatgttgctcaacccaagagcagagaagggtggactgtaatgtcaaatgctttctcagggtatgtttccctaaaattcatctatgtccctggtcctttctgttttcccacactttctctccagctgctcaataggcagctccaggtgtgtattttgtcccctcaaactcaacatgaataaagcaaatattaatcttttccttatcccatctgtaagctgttttccttcctgtgagtgctacctccatttttccaggctccagaccacaaatgttggagtcatctttgtctcttctctcatggccccaagagccctttctatttttggttcccatgatttcattcttccatatatctctaaattctcctccctccccacacacttactcatcgttgccatcatcactgccctctatctgaaagtgttaatgacctagatcacaacaacagccaacttactctctccctatccctgcttctttaatattgcaatcagtttccactgatctttcttacaggatttttccagagccactttccaagccacatgattatgctttaaggagrtatctcactgtccatcaccccaaccaacattttgtcagcctgattggaagatattttgagaagtaaaatctgctcttaaagagagaagcattgccttacttggggacagtcagaaggctgtgatacagctttcattttgagaagtagagcacattcagattctcaagaagaatgcattaaaaggacaaaaggatgaggcaacataggctgtcatgtgtttctttaaaaataaagttaccttactttatagatgcacctcaaataattggtaccatatggtatggccctcccatgtggtctcattgtttgtgtatgtcagctgtgtctgggacagaatccaattttcttttgtatattcatggaatccattgatttctgcaatcagcagttccctaaaaggctaaacctgctattgaaaataattatgttacagttgggttccaacgacaatttagagaggaatgcaaacctgttgacagaaaatggctcacaaatcagacattttctttttcttttttcttttacagcctggctgaaagtttcggttcagaagacagtttggaattccttttagatgatgaaatggacgttgatttggtaaccagattatatttgctagtttaaatattgggtttggtgaaaaatactgatgatcatttattcttttgaaattaaaatattttattcaaaatattgcacaaaccttccagaaagaaatataattttgatactattctccaattggatatataatctatctttgtcataagacattttataacaaataagtatctagaagaaggtaatgatttaggatatatatattttatatatatataaaaatatatataaaatctacaatcttcttgtaaaaatagccacttgctgattgcattttattgggacttgagatgtgttgggtagctgaaccataaaataaataggccttcaacaaaacaaccctttattgctgcaagattgactttgagctaaccccacccgaaatgcaaccacagaaactcaaaagggataacaaataccattcattgttgtatattacacaccttatccaagtcatctttttaaaaaattgtgacaaataaacatgtaaaaaatttaccattttagccattttaagtgtgcattacagtagtgtcaactgtaagcaayagatctctagaactttctgattttgcaaaatagaaactctatactcattaaacaactcctcttttctccctcccatagcccctggcaactgccattctacattctgtttctaaaagktttactattttagatacctcatgtaagtggaatcactcagtatttgtctttttgtgcctggcttatttcacttagcatactgtatccaaggttcatctatgttatagcatatgacaggatttgtttcctttttttttttttgaaatggagtttcactcttgttgcccaggctgaagtgcagtggcacgatctcagctcactgaaacctccgcctcctgagttcaagcaattctctgcctcagcctcccaagtagctgggattacaggcaccgaccaccatgactggctaatttttgtatttctagtagagtcggggtttcaccctcttgctcaggctggtcttgaactcctgayctcatgatccacccacctcggcctcccaaagtgctgggattacaggtgtgagccaccgcacccggtcaatttctttccttttgaagctgaataatattccatagtatgtgtatactacattgacttaatccatttatccattgatggacattcttgcttccatgtcttggctatcgtgaataatgaggaacatgggtgtgcaaatgcccaagtmattttttaaaaaaatgtttaaggtaacacatactttatcttaaaaatgtaggaaatataaaataattaaaatgtggggagaaaatgactttcactcagcctcctgtcatctttcttctattccttctccctttccctttttcccgcacttgcctcctcttctgctctgtctccttttcctcaccctcttcttccttttttcttccccatcccttttttaataccctcatctccccacaacactgcaaatgtgctctttctgaaagccagctctcacttggaaataggcgagtttcccatacaagttcctacctgtgtctccctcatccttagaactgtcttcctttaccccactgtattttctagataagtcacatgtgcataggtagcatatttttaagtaaattatattcttcattattgattaattaggagccagcactttatttcaaggaaccagaggagttacttcaagtcctcagagagctggaagagcagaatcttactttgtttcaatattcccaagatgtagatgaaaatcttgaagaggtaaacaaaagagaaaaagttatacaggataaaacgtaagtcattataaacaagtagatttattccattaagcaatttctaaccagagcctgggtccaactcactcacatgtggctcttcctcgtggtctctgtgaatgtaggctggggtttttaatagtttacattgtggagtgcaaaacgtagacktcgtatttacacagaatagactggctttaattttgtccctacttcctttcacttgtcaacgtattttcctactagtaataataaaagatactttgaaaaatgactaaaaagaattaaaatggtacctactgccttaacttttgtccrgtatagttttcgccctatcacttggctagctgtcatttactttaccaaatcatgctgtggatgataatgctaacaaatgtattttcattggctgtgactctcagaaaaataatttttgtgattaaatattatatcattttataaagttcctgtcaatatctcagggcgaatatagaaaggatttctgtcaggggaaagcagctggatttgatccctcacaaaattccttcctcatctaaaaatatatagtattacaaacttgaaaaagaattgaattacagagaataaatctttgtatctactcattgcaaaaatgtgtagaaccttttctcagaacagttttctgggccagaagatggcaatctttttaaacaataggtcaaactacatttaacttcaaaacaaattaatttgttcagaagaatctaaataaaaatcattatctcacagctacccattaccatttctgagactttttaatccttgtatcttttccaatcttcacagtgtctaatggccctccacccacctccacaataagattttctgggacagggtgggtgcaggtaggcaggaaagggggatatatagaatctatctctagaggatcttatcagaatctttaggtgagggaattaggagtctatattttccctctcggctccccacatattctgattatcagccacgtttgagaacactgggttcctgatgcctcagctctgctgctatttgggggaattcgaatggaaccacaaaagtaggggaggggaagaaaatgccttctgatggaagttaaaaacagcatttgtgcatgtatttttctcattttaacttgaaaagttgcatgtactttggcaatgtcttcaaatacaracttgtatttggctcactacatggattttgacacatgatctagagtgttaaagctcctgactgatggttatttcactaaccacaaatttcagatgagggtctctttcttcttttgtaatagaaatagcaacatagagtttcttttggagcaagaaaaaatgcttaaagctaactgtgtgagagaagaagagaaagcagcagaatygcaattaaagtccaagctctttagctttggagaatttaattcagatgctcaggtaaatcactctttgcctatggtgatttcattttggctcatgattataatttttattccctgtgtcctaagtatgtgaataggagagttaaagcaaatcacaagtcctagattgatgacagaagtggaaagccagcttggaatttatcttgccattatgtaatagccaatttacataggcagaaagcattcaaattggcattggggttctcttaaaacgttgctcttttgcaatgcatgatattgaccatagtttcccctcgaaatacatttcttcagagcctagacatatgtagtagttcactgtgtgttatcattttggtggtaattcmaggagtaattaacagaggaagccatgaatcaacacaattaacagtgactcarcactgactagaaaattttcccaacactgagcctgtactagatttttgcctcttcaggcctgcatagactcattatcaaaacagctgtgatatgtgctagtacacttatttattgacaagttcatctctcagctagatgcaaacccccttgagtgcagggattgacttattattcttcrttcagttgagggtccctttaaagttggtgctcaataaatgtttgttgaatgaatgatgaggttagcttttagacccacaaccagctccatctaacattgattaccttataaaaacctcaaatgaaataaaaattcaaagctaatatataaggctaacattgtttcgggaccaaactgagggttgggctgctatttctcgtggcccaataacgagatgcagatgaactggggaggaagacagtttttatttctgtaactggttatagggagaaggcctggaaattattgccagaccaactcaaaactacaaagttttccagagcttatataccttctaagctatatgtctgtgtgtaagtgtgcactcatctaaagacatgagtgattaacttcttttgatctataacgaaggtctgagtcctgaagaccttcctctggagcctcagtaaatttacttaatctaaatgggtccagatgttggggtgattacccttatcttgtctcctgctaaatcagggaggtttgggtagttccttcagatccccaataaacttgtctgtggaggcctggagagtttcttcatccccaataaaacttgtttaatcttaactgagtcctgttgagaattccttcattattttgtcattctttaagaccctggaaaggtctaggcaaaactcttggtgggcttttgttacattccagcctttgtataagggcactggcttttaatatttaacttaaccactcagtcagtactgaaaacagttgttaaggaggcytgcgttagtgagacctggcctgccacaacatcacatttatggatatgaacttgattttcaaacagaagtagaactgggagaamtgcatcagaagaagactgtcctcccctacccacaggtgaacagggttacaaaaagcacaagctggttatggctcctccagacacacacacatttcctagggagttatagtgccctgagttagtaggggatggggttgtgcattgccggggccaagaggtgtgatgatagccacctttcaattcagtgctgtttttttctaaccattttttttaaaactgtggtacaatatacataaccaaatttacctgttagctattttaagcgtgtcattcaatggcattaagtacattctcaatgttgtggaaccatcaccactatttccacaactttttcatcatcttttcaacataaaaatgtaacatcttaaccatttttaaatgtacgggtcagtagtgttaagtacattcatgttgttttgcaatctccaaaactcttcatcttgcaaagctgaaattctatacccattaaacaataactttccatccctccctctcctagcccttggcaaccaccattttacttcgtctctctgaatttgactattctaggtacgtcacaaaagaagaatcatacaatattggtccttttgtgtctggcttatttcatttagcataatgttttcaaagttcatccatgttgcagcttgtatcaggactgcattatttttacagctagataatattccattgtatgtttataccatatattgtttattcattcatctgttgatggacacttgagtggtttccacacttcaactgtttaaaataattctgaaaccaattgacatgcaaaatgtctgataaatatctgtgatatctcccctcctccctgccccatcccaaccaagcccctttcatccaagtttggggcaactattaaaaaataaaagcggcatttttgatactctttaacattgaggcaaccagatacctaaagaaagaaagtagaattgacgtaaaattcctttttaaatggctatccatgaaattttgatcacaagtgtaaatttggcattcatgtattgcactctgcggaaatgggactrataatccatagtgtcttctagagatgtgaaatgtggggtggggaaggggaggtgaagcaggaaaattgggagggaaacgtattcttaggattttttccttctctacctccattttttcagctctcagaatatacaaaacataatcctttgagtaaatttagctgcagctcattttttaaaarattcttttccagcgttattgaggtataattgacatatttgattgtgatattcataaattatgttactctggagctatcagtatgaaatgaattttagtctttcaaaacttccactcttaatgatacttaatcccctaaaaattttgcccttgatccagtatttcacttttaaaataacattttaagttcaagtataatgtaatgttgagaagtgcacaaatcacaagtgtacctctcaagaaattttctcaaagcaaacacacccgtgtgctaccccccagatcagggaatacaccattatcagcccctgcaaacctccctcacacctgcttccaggctttaccagccctctttcccactgtcctgacgtctcatgccatcaatcagctttcctgttttcgaactctgttggaatggaatcatgtaacatgtctggcttctttccctcaatactgtgtttgtgagactcatccatgttgtttagtgtagcagttgttacttcttcattgaacatgaaatggaacataaactgctccactgttcaatgtgaggaatgtgtttatctctggttttattgttttctttgcacaaggagaagatcagctrcaattgagagaactgtgtacagtcaacacacagcagaatgtcacatggattagaatgacagaacccttgagtttgaaaagactttcaatgacatctagatatccaccccggcaacctttcccctctcccgttttgatacaatgattcctcctaaaacactgctctggtcatatcacttcccgttcactgttgaaaggcacctgaagttctctgatcagtcttccataattcctgtcccattcacctgggcagactcccttggcagctcctcctccgaggtactgtgggctgggcctgccatctgggggcagttccagggatggggctgaaacttcccttccctgtcatcaattggcctgtgccttgtgctcccttttgactttttgctttgtcaggccaggctctcaatccctttttcatatgtgaattaccttcattcatctcattcttctctatctcttgttcttaccttgttatattaagaaaatatctcttctcgccattttctctcctctcagaagagggaatttaagaaaaaaagggggagggggtggtggtgtagaaaagacatcgtaaaaagccactgccctgctcatccatctctaaagccatctaagtgttcaagaggtctccttcagaaatttccatcaactagcaaccactctcatcttaaagttgtttttcctcaaaacctgtggtgaatatatttttaaagtatttttctgtgctttatttagtgactcacattgcagcagtgttgttttcatatgcaatttacaatatttcaatccgatgggttacttttattttcttttatatttttctgtgtctccaaggtttagaaaaagaatgtgttgttacataaataggaaacacagtaagtgttattttagagagaggggaaaagggaaatttatggccaatataggacttttgctgttttcttttatattattatgtatttctccaagttttctaaaaggatcatgtcattcatgtaaataggaaatataataagtgttaccttatgaaggtaaaaaggagctttatgctaaacaggaccatcagaaagctttttaagctaggaggtggaagagaaaagctgttggaagtactcttggtatcagatcttggcttgtaattgtgttggtggctctgtaaggtgtttgtggttccaggaggggcttcccatggctccaggagccacctctctcttgagtgttatttgtcgctggctttatggtgattctcatcttcttgagtggaagcaggaaatggggcagaatgctacctgaagagtgattcacattgcccagcagtttgttgagctcttcttaattgcaaacaccgggttcacaatggagacagaggatgacaattttcttacggtcctgagacaasttacctaccacctcaagaatctccacsaacagttaaacggcacagtgtcgaggtacagggatcagcaaggtttggcctaagcttttgtttagactagaatactgcaatggcttcccaacgaaaacagtgaaaatgatacttctaaaaaggctttggtaggccagcctgggtacctgtttgcttgcaacttttttttctgagaatgcatttagtcatttattcagcaaacatttattcagtgcgtagttatgtgcaaagcactgttttagttgtaagtttaagcataagatgtagctcctgctctcctggactataaggataaggcagagaactattacataggatgattatagtttcgcaattataacagagtaatacatgcaaaaaaggaggggggctgggttacatattgtgycaaaaggaaatgcatccgagtggcaaaaaaacgatttaaaatgtttgttgcctgtatttgaattcttagggagtcagatatacaaaaacattcaagcaaaaaatattccacccattataattacttttcatatctagagttcagtatattttaagaaaataatccaaggtgttctatagtaatgctctgactataaattataatataggttaaatatcactgctgcattttctcaatgatttattaaaacttctcattttaaaaagtaaacattaggccaggcacagtggctgatgcctgtggccgaggcagctcgatcacctgaggtccggaattcaagaccagcctggccaacayggtgaagccccagctccactaaaaatacaaaaattagctgcgcgtggtggcgcatgcctgtagtcccagctacttgggtggctgaggcacaagaatcgcttgaacctgggaggcggaggttgcagtgagatgagattgcaccactgcactccagcctgggtgacagagtgagactccgtctcaaaaaaaataataaaaataaaaatgtaaacatttaatagcatatacatgggattttactgtaatatagtaaaatggtatatttattgaatgtggaatgtgatgttaatgttttctgctcttctcaatctcaggaaatactgatagactcacttagtaaaaagattactcaagtatacaaagtctgcattggagatgctgaggatgacggcctcaacccaattcaaaagctggtaaaagtagaatctcgcctggtagaactgtgtgacctcatcgaatccattcccaaagaaaatgtggaggcaattgagaggatgaaacagaaagaatggcggcaraagtacagtcaataaggataagaatgacttaatgagtagctggttttgctcagattccacaaacacattagcaagtctcttgtgtaatgtcatattatagggacacagtgaggaggaatgaaatccagccctgctctcctcatatagctattatttagcatgggagatcattcatcaaatactcttaggaaataaatgtgtcattaccaatggtaatgagcaccacgaaggaaggaactgggtgaacagagttcaccaggggcaactgacctagtttgggatggacaaactagcctggaaaagcaaatctttgtaattatatgaaatttatgaataagtaattacatgaaaatttttgaatagctatcatggggaaggagaattgcactggtggtgaaggacccaagatatagaattaggagcctgtcatgggaaaacttcaagcagactcaatctacctgtggttctcccatgaagggctccaaattcctaatgaaggaattgtttgaaagtctgagcaacacaatgagggttttccgcagtgtataactgccaacatgtacacaacattcactcatttattcctcaagacaacctcatgaggattatcatccctggagccccaacccatcccccacatgcttacatagcttggtgcccttcaaaggagatctgtgcattgagggcggtatggcctgaccggggcctttcagaatgcgttcacttacaaatttccataccaagttaaataagaacttttaagtacaaacagttgtcccttggtatctgtaggggattggttccaggacctcccaaggataccaaaatctgcagatgctcatgtctcatataagacggcatatttgcatataacctacgtacatcctcctgtatactttaaatcatttctcaactacttatacctaatatagtgtaaatgctagagttgtcatactgtatttcttaaaatttgtattatttttattgttggggcttttctccaaatattttcaatctgcagttggttgaatgcccagatgtggaactgtgaatatggagggcctactgtcctagtttgaggcaatgattattgtaaatatgacccctagcttactgtggcatgtagggaatgtttacaagtgggataatgttcacgtaatggcaaaaaacatgttgagaggcagactagtactcaggctaccagcctggggattagaccatgctgagtgagttcagttcaactatttatgactttgtgaccttaggcaacataagcactctagtcggtttctttatccgtaaaacgggagtaatactgataaatacaggttgttgtgaggattaaattagatgatccaagtaaattatgagagcatgcttggcgcatagtaagtactcaaatattagccagtagtgttagatattttgttattgcctactactttatggatgtagggtggatatgcttacccacagtaaaaatgatgtccagactatatyatggtgatcctgatgggatcttattgaacataaagcaagctttaaaaaaaactataaatgaaaagttactccttccctaagatgacctcattatgactacactaacagcacttccatcttttttacactagcaaatatatttgcaccaaagtgtaattacaactcatttttagcagtgatacatgaatgtaattccaattacttacattcttcttaaaaagaattttagctgattttccccatggtttggggcacctaacacggcacctaattttgcaataaaaatgctcagtacatgttatttccattccctagtatataaccttacacttagaatatcattaaataggtccataaaatagctatcacatatttagtgcctattgctcaccaccttgtacttgataagttgcacagattacttaatttttccctcaaaacaaccctaaagagagtatgacaaatagcatttcttgctcacaatttgaggatattattcaaaaagattaactggaaggtacacttttgtggcagctcactaagctatgcatttatttgtgtactyttctgtatgtatgtgacatttcaattaaaagttttaaaaagaggaacaagtagctgaaagttaattcaagtagctattatacaaactatctgtaaagtgctgaaatgtttaggaggtcaaggtgggcagatcacgaggtcaggagttcgagaccggcctgggaaacatggtgacaccccgtctctactaaaaatacaaaaattagcygggtgtggtggcatgcacctgtaatcccagctacttgggaggctgaggcaggagaactgcttgaacccaggaggtagaggttgcagtgagccaagatcatgccactgcactccagcctaggcaacagactgagactctgtctctgaggaaaaaaaaaaaaaaatagaccaagatctgggtatattttatattttccaaaatgatgaaatttcttcccatttcaaaatagtatttgttgtcgagatttacctgaatattcaaaagccacggttatgagtaaagatgaagtgtcattttcatttacctttaaaggaggtcttctaktyacatggctcattaacaaatagtaatgtacttttcttactcaatgtgatttatagttacaaraatgtttctcccttcttgtgacaggtttcgtgatgagaaaatgaaagaaaaacaaagacaccaacaggaaaggctaaaagctgctctggaaaaagcagtagcacaaccaaagaaaaaggtttgttttgctattaatagatccagccatatcaatatgtgatacaaaatacaaaaacaaaatactttattcgtctaacttatccaggttgaacttcagaaagataatctttcttgctcacagctacaattggtctctggttccttgttacttttagaataattcaaattagtggctctccagttctcaattagacacacattttagtaaaagaagcctcttctctcctctttttagacctaggttcattaaaatcagataatttttttcttgttttttggaatagattaaaagcatattgttcaaagttcaaaagatacaagagtattcagtataaagtcagtcttcctcagttccccttcctgaaggcaaccactgttaacaggttcatttgcatccctctggaaatatacatacacaaatatgtatttatgtacatattctttttcttactaatgataactaggaacttggcttctttcactcagtaatgttttggagatgtgaacccagagaatcgcatgtaactgtggggactgtgtacaatccccacattgtaaagacaatgagattgacagttggagttaagatgatttgcccagagtcactttgacttagcagcacaatcaggaccagaagccaaagttctttattttgcaagactacctgtccaatcagaagtttgggattaggtagtcaggtacatgtggtccatcaattctacacagggtaaggagtttgtttctatatgmcactctttccctcctctgggatagcatctgaaatatgttccagaaagacaatttcatggttatctgcaaagctattgcggatgctgattcttaccacagtgatagctaacacataacgaatgcttactgtgtgccttacaactaacctcaagaggtaagaacttgaaaacaattctgaagtatgggaattaatatgtgccatgacaaaaaaacgattacttcaaaatattttattgaaataaatacttcatcttaaaaaaggtatttatctagttcaattctttccatgaagactttcctcacctgtcctctcctcccaagaattaaccattcatcacccttccacatggactacttagcaaacccaccaaattgaaattattattttttaatatattcacctttccttctagaccatgagttttatgacgtttgtattcctaatacctggcacatcatggatacttgatgtgtagtgaattaacagactaaaaatgagcataaaaactaaaactggaaaaaattgggggaaaaaatggttatctgataaatcaacaacacacaaagacctctgatagaagctgacccagttaggacacttcatcattgctaattttctcagacactattaataacaaatgttaccaaagatctttgacagttaaaaattccgatattgcagaaggaattcaaaaattctagtcccccaaggatatttttgttgttacaatgatggggaaaagtgctattgttattcaggttctctcaggcctgcaatgcaggggacaatctcacataagaattgtcctacaatgtcaatagtgccttttgaacacagtggcaatgtcccatcaaatctcatagaattatggtagtttccccacttatacatttaatgtayacaaattcagctataaaagcaaaacaaaataaaaagyggaggagggaatcccaaaagtaaagagaaaaataagtagtaatatatttgagtatatatgacccagagagaatgaataggtatgaactcggggtttcccaaagcctcttctgttgggaacacctccagaagccaaccagtattcaagatggtacatggttttctggactttttatttaacaagatttctaaatgctagtcaggtgctsaacaggagaaagccatctcttccaaccatggacgaaaaactggctatggcacttactgagaaataaaatggtggccttcaacatggtgcttttctaggctgaccacatttgaaccatatactatttgatgactttacctaagttttcccacttcccaataaaacctaactgctgttccttctgcatagttattggtgtccagtttgctactcaactttgcctagcatgttagacatccgttaggttataagtcccttttaactgtgattagttaatgttacaaaccatattattccttgtaaaaatcaagttaatattggtatttcacaaatttcaatagaaaatggctatgctmaaaaaatattaagtattttgtttttcttttgtttcagttgggaagacgacttgtcttycattcaaaacctccatctggtaacaaacagcagctacctttagtcaatgaaacaaaaacaaaatcacaagaggaagaatatttttttacttgaataaaagcagtaagacattttattaccagaatgtcttaggtgtattttgtaaattttaagtctttaagtattcatatcataagtattattccatatagctaaacactttcttctatactttgagttgtcccacttggggatacacaaagatagtttactgataaaactatggtaaatgaacactgaagtgtaataatggccattctcttacaacatgagaatgtaaatgatgtattttctcaacccatctgtagggaagttcatagcatactgttattactatggactatacattttaacaatgtacaaccctaaaatacctgaagggttttgaggggcttaaaactcaacctcgaggttatgtctcagaacataatggggagactggtttttatttgacattacattttgttcagagaacttttttctcttcagtgaacaaaccgtatgccttcagcctgaatgtcagttcccaatttctgttgtgccctgtctgtacaatcattttaatttttagaagatgcttcaattttagctacaatatgtgcatttagcttatattgacacagaattaacatgtaatttattgactactaagtaaaataagacagtatattattaataccaagaaaatgtttaattttatacgttaaaagtagctcaaaaataactttaaaagaaaaagttgcatttaaaaggtctcagctaatagataattttacaagaaaaggtctgaaattcaccttcataaaaatatctaaagcatataaataattatcctttatgggaaaaaaaagaatattgggcttacaaaagaaaagcaacttaaatgaaattcagtggcttttaaagcattagttcggtgagtaatctttcccaattggttcatcatttcagctttgcttgtaaatatctgaatacaaatagttcacaagtcaagttgaaaaacaaacaaatctttattgtctagaaatatatataaaaaaaatcccccacaaaagatgctattctctcatttccccatcttcttcctcttcttccacacctctgatataaaggacattattacacctgtaaatagaaaaagtcgattttgttgttccaaccagaaaccatgtatgatatgaattactatatttttattatgaaaatactgaatactatatttataatattcttgtctttaaaaaaattttttaaatatattcattttaaaaaaaagtttcacatagatttgttgaaaagcacatggcacttattttccaccatatggttgttataaaatgacatctttatgattttccaaaggaaataattaccagaatttggagctttgaagctagtacagaaaatcaatataacaaaacagccagacccaactaaaattcaaaactaagttcccgcaacaaaggccactgcaaaaggttgccactgcaaaagattatagctaagagctagaaaattaaacatcaacactagaaaaatcttttggccagttccaaaacatttgaaaacttacctttgacaagtttaacaatttcaaagacttctgaagtctaactgtaaagtattataatagtgattttttaaaaaaaagtaattccaaaattgaggcactaatatatttagaacaggtattcctaatgctcaccagtaactccttacatatactactgctgtttgttaccttattaaaacttcacccagatgtccagacaaagctccatctatgtattcttctgtatttgcaagctttcaataaaaagaaatatattagtataatcacacaggaggaaaatattacaatacagctaatattggtgagagaactcattaactgagacctttctataccaacaactcaaatttatctataattaataaacagaagatgagctttctattactattgtagtacttttggtttcatataaaccttcaacgaaattaatattcaaagcttgtttcaacataagtttctgaatctcccaggttatgtaatatttctttctattagatattaaaacagtgtgtggaagaaggcagtctctaactcatattgaggtgtccaaataggtatacgaaagctatggctaacatgccaaatacttttatattagtcaacaaccaaagcaaataattgagtaagaattttcttcttttcctgtcttttaagaaacagggtctccctctgttgcccaggctggaatgcagtggcacaatcatagctgaccaaaaccttgaacacctgggctcctcctgcctcaatctcctgagcagctaggactaaaggcatgtgccacaaagcctggctacttcgaaacaattttttctgtagagatgagatcttgctatattgcccaagctggtcttgaatttctgccttcaagtgatcctcctgccttggcctcccaaagtgctgggattacaggcataagctatcacatctgggcctgaataagaatttttaattatgtactaataaacagggaaaaacaagttcttaagagaaagttaaatagttaacagtgacctttacagctattttggtgaactacagcaaagtagtgtgtttcccttatggtattattatgaatcgaatgtctgagctcttcttactttacctacagttattttggtgaattatttctaattttatatcaaaatgtttagctttccttctacatataggtaacaagctctacttgtaattaaaagaaaaatcacaatcaatgccacttgggactcagagaaggaactaaggagtgatgggagagagggaggtttccttcacaattaggcacgtggaaaaggaaaagaaaaatagggcttaacaataaggattaaaataggatgtttcataaggcatgaaaaacatggtaatgaacactactactggatgttactccctttcttatagacaacaaaaagtaatctccattatccagatgatatagttttgtctgaaatatacgaggttgttgagacagtttgtatgtaacagctataagaaataatgtattaagagcaactaattttttgtaaaaagtaattacaacatttaacatttctaaattacacaataatgttccaaatactttctatcatgttcttcaccatcacttaacaggctctctatggccgccattttaacctaactttctgtcattcgtcccttaactcaatctgctctggcctttttgctgtgccttgaacacaccaagcatgcttctgccacagggcctttgtacttgctgttccctcaaactgggatgcttttccccagatactcaactgagttgtacactaattctggtatcttccagaattcgcctcctcagagaggctactctatataatattgcacatactgtcttcccccttttcttcatggatggcatctatcatgcctattatcacattatattaccacctcccaccactaaaccataaactgttgagggcagggactttgttttgttcaatgctatattcacagtgccaggcacataatggaattcaataaatatttgctgagtgaacaaattcaaacactggtatcaatatggttgactactcaaagtggttggttactcagacattttgcaactctagcagggtcactagcaagctatattaattctaaaacaaatattaagtggtaattcttttattattgagatgttaatttccatagcataaaattcacccttttaaagtgtacaattcagtggttttcagtatattcaaaaacctgtgcaactatcaccactacttccagaatattttcatcacaattcatatacttcccagatttttctatggtcttggtaaatgactcctgtttaaggaattttccacactcaaactatgctttgggggccttaatgtcatgtgctcaggtggtaattgcctaagttaaggaaaatcatagctctctgcctacttaagtactccttttagtactctgcttacaagtatggaatccttggattcatgattggattgaccacctgtcttgatagcctttaaaaacctgcctggaaactactaccattaaaaaaacaacaaaaaatcccaaactaattttttaaatgtgcaaaagacatgaacaggcatttctccaaagataaacaaatggccaataaacacatgaaaaggtgctcaacatcattagccaaatgcaaatcaaaaccacaataagataccacttcacacccattagaataactattttataaacacccatagaaaataacaagtgttggtgaggatgtggagaaactggaaccgttgtgcattgctggtgggtatgtaaaaccacgtagctgctgtggaaaatagtgtgacagttactcaaaagaaaaaaaaaaatttctctgtcatccaggctagagtgcagtgatcacagctcactgcagcttcaacctccccaggctcaggtaatcctcccaactcagcttcctgagtagctgggaatatagctgcccacaccatcatgcctagctagtttttgtattttttttgtagagatgcagtttcactatgttgcccaggctggtctcaaactcctgggctcaagcaatctgctgcctcagcctcccaaagtgctgggattacaggcatgagccaccacgcttggcctccttaaaaaattaaacatagaattaccagtaatccagtaattccacttctgggtatataccccaaagagctgaaagcagtgactggaacagacattcgtatacccatgttcacagcagcattatttactacagtccaaagagggaagcaacccagtgtccaccaagaggcaaatggattagaatgtggtatatccatataatggaatattattcagtcataaaaaggaaattctgacacatgctacaacatggatgaaccttgaataatacactacgttaagtcaaacaagccagacacaaaaggataatacacaattccacttacatgaggtattatgcacggtcaaattcatagacatgtagactagtggttaccaggggttagttaggtggaggaaggaatggaaaattattgtttaatgtttaattgtaaaattattgtttaatggaaaattattgtttaatgggcaaaaaatttcacttttggatggtaaacaagttccagaaatggacaacggtgatggctgcagaacaatgtgaaggtacttaatgccactgaattatacacttaaaaatggttagagtggcaaaattgtaatgtatattttaccacaataaaaagataattaattacaaaaaaacccaccaaaacacatggctgaatcatttacagaaactcgtttgacagacatacagtcagttcaattcctttggcagatctgtctttcccctgaaggaatgaatttcctcaatagctttggtgttgtgcctttagcattcattaaaagactcaataatttcacttgaaaactttctttcagggctaaatgatgagaaatgttttgttttctccagcaaagtagtgtgtttcccttatggtattattatgaatcaagtgtctgagctcttcctactttaactactaggaataaaatctgtagctgaattctggtttaagtccatgtcttgtacctagtatatcacagtatccctcctggctttgactttatttttgaattttgccgtatatttgtcaatttaattgtatgtattcttattagtcagactaaacctttgagaaataaggtgaagcaaaataaatgcaatgttatgacctttacagctctttagcttacctgcatgttcatgtagccatctacagataccagatagcccttgtactccattccccacttaagtttcaccatcactggctttcctgttagtccattgaggaaaggtttgggattgaggggtaaactctgcacaaagaacaaaaaaggatctaattaattatttttcctcccaccaccaactctcttctaccgaatcaccaatattttgtggtatgcaaatgaagaaaacttttgactccttatt

SEQ ID NO: 97416 - DNA, 130450 bp, Homo sapiens
  misc_feature (1)...(130450): n = A,T,C or G
tgtgaggccaaggcataagaatcgcttgaacccaggaggcaaaggttacagtgagccgagattgtgccacagcactccagcctggatgacagagtaatactctgtctcaaaaaaaaaaaaaaaaaaaaaaagagagggagttaggagggccagagtgagagtgaatggaagtgggtcagactgatatggccataagtcaagcaatgtatacagcccgtagaagttggaaaaggcaaagaatggattctcttccacggcctcaataagaaatgcagcctttgattttaacactgtaaggctcattttgtacttctggcctccagaaacttgggatgataaatttgtgctatttaagccactaagtttgtggtaatttgttaccacagcataggaaatgaatacaaatatcaaagtgtttgtggacatattttaagactacctcaggcaaccctctggtcacaaattatttatagttctcccacatgcaaaataaacttaccccttctaaggccccaaagtcttatcccattatagcatcaattcaaagttcagaatcttatcctctacgtaagtccagggaagatgagacttcttgggtgtaattccttaaatacagctactcaagtacatgcttttcaatctgaagttctgcgaacaaaaagaaaaaggtcatatgctcctttccccacagcaaccaatgtaaaacagcaggggcagggagataactgctatagacactcctgttccaacaggtggaaaccaaggtgcacagaagtcactggttcatagcaattctgaaatccatttgagtacaggtttgcagttctacactcaaagcctgggaataactccctatggcttttggttccaccttctgggctcttggttttatcctctaagtcatccttttttgtgtgaaagggagatgtgtttggacctaaatagttttcttagcctgcttcctgtttgtagaaatgcgtttgtagaaagggtccaaaggcccctttcctttttgtactctttttcagctcaagctgacagtatttctgacaatacaattctcttaaaacaatttttgaatctactgtgaatcttactgggttttagtccaggagacaaaagccatggcagcaaatacctttgagatatgtctttttctaccttgggcttctgctgaaggacaaagaccttaagtttcttagaagccctattgtttgaatgagaggacctgtgagccatactcttaaaatcttttttctgagacggagtcttactctgtcaccgaggctggagtgcagtggcgagatcttgggtcactgcaatctccgcctcccgggttcaagcaattctccagcctcagcctcctgagtagctgggattacaggcacccgccaccacgctcggctaatttttttgtatttttgtagagatgaggtttcaccatgttggccaggctggtctccaactcctgacctcaggtgatccacccacctcggcctctcaaagtgttgggattacaggcgtgaaccactgcacccagccactcttaaaatctttagagagtctttgcctgattgaacagtactccgaggtaccatccttaaacacaacaggcgtggggagtgggaaagcgggtgatggagggtggattgaggggtatttacaaaaataaaagacatggtctcagcactcagatatttcagaatctttggggagataaactatatacatttaaaaagcactaaagaattacaggtcatatccctaatgagtatagatacaaaaatcctcaacaaaatactagcatactgacttcaacaatacattcaaagaataattcaccatgatctagtgggatttatccctgggatgcaagtatggttcaacatatgggaatctataaatgtgatacaccacataaacaaaaatcatatgatcatttcaatagatacataaaaagcatttgatgaaattaaacatcctttcatgatgaaaattctcaacaaattaggtatagaaggaacgtacctcaacacaataaaggtcatatatgataagcctacagctaacattctcaacagtgaaaagttgaaggcatttcctttaagatcaggaacaagaaaaggatgcccactcttactgcttttttttttttcaacatagcactggaagttctagtcagaataattaagcaagagaaataaaaggcatcttaataggaaaggaagcattggaattttctctttgttgacaatatgatcttatatatagaaaacccaaaagactccaccaaaaaactgttagaactaataaagtcagtaaaattgctgtacacagtcaacacacaaaaatcagcagcatttctagaggccaacaacaaatccaaaaaagaaattaagaaaataattctacttatattagcaaaaaccaaaactgaaacaaaaaaggtgtaaatttaaccaagaaagtgaaagatctttatactaaaaactaaaaaacactgatgaaagaaattggaaaaaacacaaataaacgaaaagacatcccatgttcttggagtggaataattaatataattaaaatgcccatgctactcaaagtgatctatagattcaatgcaattcctatcaaaattccagagttatttttcatggaaataaaaaaatcctaaaattcatatggaaccgtaaaagatcccaaataaccaaagcaatcttgagcaaaaagaacaaagttgggccaggtgtggtggctcacgcctgtaatcccagtactttgggaggccgaggcgggcagatcatgagatcaggagttcaagaccagcctggccaacatggtaaaaaaaaaaccccgtctctactaataatacaaaaaaattagccaggcgtggtggtgcgcgcctctagtcccagctacttgggaggctaaggcaggaaaatcacttgaacccaggaggtggaggttgcagtgagccgagattgtgccactgcactccagcctgagagacagagccagaatccatctcaaaaaaaaaaaagcaaaaaaaaaacaaagttgaaggcatcacagtccctgactttaaaataaacgacaaagttacagtaatcaaaacagcatggtattccataaaaacagatgcattggccaatagaacatactagagagtccagaatttacagacaattgaattttgataaggagccaagaacactcaatggggaaaggaatctctttgataaaaactgttgggaaaccatatatccatgtgtagaaaaatgaaattggacccttatctcacaccgtatacaaaagtcaaaatggattaaagacttacctgtaagactggaactactagaagaaaacatagagggaaagctactagaagaaaaaatagaagaaagccactagaagaaaacaggcggaaagctccactacattggtctgggcatttttttggacatgacctcaagaacacaggcgagaaaacaaaaaataaacacatggaattacatgaaactaaaaacttctgcacatcaaaggaaacagttaacagagtgaagagacaacctgctgaatgggagaaaatatttactaattatacatctgacaagaggttaatatccaagatatacaagaaactcagtagcaagaaagcaaataacctgattttaaaaatagacaaataatctgaatagacttttaaaaaaaatttttttttgtagagatgaggcttcactatgttgcccaggctggtctcagattcttgggctcaagcggtcctcccaccttggcctcccaaagtgctgagattatgggtgtgagccaccatgcccagcctgacacagccattcttaaaagaagacatacaaatggccaacaggtttgcgaaaaaaaaaatcactattattagggaaatgcaaaataagattacaatatcacctcacacctgttagcatggctattaagctgggtgtggtggctcacacctgtaatctcagtactttgggaggctgaggtgggcagattacttgagggtcaggcgtttgagaccaccctggccaacatggtgaaacgccatctctactaaaaatacagaaattagccaagtgtggtggcacatgcttgtaatcccagctacttgggaggctgaggcaggaagattgcttgaacccaggaatggaggttgcagtgatttgagattgtgccactgcactccagcctgggcaacagagtgactcaatctcaaaaaaaaaaaaaaaaaaaaaaaaaaagaattgctattatcaaaatgatgaaaaaaatgtgttgctgaggatgtggagaaaccttttacactgttagtgttattacagccattatggaaaactatatggaggtttcccaaaaaattaaaaatagaactaccatatgatccagcgatgctatttctgggcatatattgagtaactgaaatcagtatatcaaagacttatttgcacttccatgttcatttcagcattatgcacaatcgctgagataatggaatcaacctgtgtccatcgatggatgaatggataaagaaaatgtagtaaacatatgcaatggatactattcagccttaaaaaagaatttctgtcatttgtgacaacatgaatcaacatatgcaatggatactattcagccttaaaaaagaatttctgtcatttgtgacaacatgaatcaacttggaggacatactaagtgaaaaaagccaggcacagaaagacacataccacatgatctcacttatatgtggaatcttaaaaagtcaaactcatagaagtagacagtagaatagttgttagaggctggaaagggacggggcgggtaggagatgcaggatggggagatgctgttcaaagggtacaaggttcagtcagacaaaagcagcaagtttctgagatctattgcatagtgtggtgactatagctaataataatatatcgtatatctcaaaactgctaagagtaaatttcaaatgtctcaccataaaaaacgttaaacaaggtgatggatatgttaagcttgacttagtcgttccatattgtatacatatattaaaatataacattgtaccccattaaatatttacaattatgatttgtatatatatttaataataataaaaatctaaataaaatattaaagaatgcctacaaagcaaggtttaagatgtaaatgaacacagtagtatcacggaagggattaaatattgtaacatttattgagcactacgtatatatttttgaattcccacaaccctggaagaatgagaaaatcgagactcagggagcgttaagtattttgcccaactgcatacgataaatacataggaaaaacaaacacacagaagaaaaccaaaccaaccaaagtatctctttcaaaaggaaacgacagtctccttaaaggcaacccgagacaaatttcagcaaagccgtgggacacatggccttcgagctgctgtccattattgagtagcagaagccaagaaggatggaatgttttggaagaaaggggtcgggggtcggggtgttcaaaggacggaccgaaggtaagattgaagtggggtcagaccatggcgggacagcgcaccggagaatgaacagcgattagggaagagtggcgagcgggtggcaaggacggagggcggaatcccggccggggctgcgggaggaaagcgcacggacaggagccccaccgctcgaatgcagcgcccggcggctggcctcgtgaggtcacaggcccttacgaggtggggcaggcaggcgcggccgcagtgccttccagtcagcgcggaggcggtattgagttcagccgctccccacagccccggagcccctgggcggtggcggtggccgcggcagcaccggctcgacagccgatagggtcctgggcccgctccgctcggggtggtcggtgggcggagcgtcgggctcggtcaggtgaccgcgggggcggggccgcgcggcgcgggatcctgggaaggctgcagagctagagcagcgccgcccgaggggcggcaggggctgaccacagagagcgcgggggcctccagccgagaggaagggagggcagctcgggccggtagtgggacccttgggggacagaggtggggaggggaggcgagacccgctgaggagttgggaggggagccttcgaggtggagggtggagaatgcagtagggtgcgagggaggaaggagaacagtggtggggctgggtgaaggaaggttccagaaaggaacagtgaggggactgagtgggacaaaggggcagattgaagggtgactgagactgatcaggtggttcctcagaaatggtggttgttgtagaaggctggcggtcccgggggtggkgtcacttccctgctccttcagcgggaggcggagacctctattagcrcactcatttccatcttgcgggtcgttcactcgctagcttacaggtcctctttcttcctgtagaagtcgttggcttcgtaagagcagggtctatgggaagcctcctcagcgtgggttcttggaagaggtggaggttcgttcactcgacgtttgttacacaaatatgaaaacagggtgacgaaagtttgaacgttcatgaatggcagtagctgcaatggagttgtgtatgcagttggtattaatgacgttttcagtccctctggcgagagaaaagcgagcgagtcgggcggcttgtgagggaaatgtggcatgagaggaaagaggaaggtattttgtgaaaggatgtcatacagagtcatgcttcagtgaagacgcctttgtttttctcatcttaaagcctcacagccccattttcctctcagctactgccttatttctcttaacaacgtaactccttgaaagagcctaccctactggctgggttcaatttctttaccccgttctctcttgtactcactctgacgacattgtctccttaccaccccacccagatggctcctttcaagtttgtcagtgtcctccgtgttgtgaaacctagcgaaccattcagtactgatcttaaccgcccaccccaccccccttttttttttttgagacaaggtctctgtcgtccaggctggagtgcagtggtgcaatcatagcccactgcagcttcaaactcctgggctcaaaagatcctcctggctcagtctttggagtagctgggactaaggtcgccatgtccagctgattaaaaaaaaaattctgtagaggtgggagtttcactgttgcccaggctggtcttgaactcctggccttaagcagccctcctgcttagacccccacccccgcatcaaagtgttgggattacctgcataagccaccatgcacagcctgattgctcactcttgaagtactttcttcacttggcattcaggaacccagacctacctgatttccctcctcacagtaaccagagtgatcctttcagaaagaacttcagattatgtaatccttctcctcagaactctttcaatgcttgtcactccttcagagtacaagccacagttcttactgtcatctaggggtcctccatgatatgccactttcacttagcctctctgatctctcctgcttcagcctcctggggccttcccactattccttgaacattcttcttgcctcggggcttttgtacttacttttctttctggctgaaatgctcttccctaagatattaatcagctccctacttcagttcytgcaggtctgtactcaaaagtctccctctcagtaaggtcttccttggccacccattctgttccctgcatctcttcccctatactacatttcatattcccctccctgctttacttttttttttgtacttattgcagataacatacaatatgttttatttttctattttattatttcactccctgactagaacataagcttcatgagggcagattttatatatatataaacaaaatatatatatatatatatatatatatatatatatatatatatatakcatatatatattttgttcattggtatatccctagagcctaggagagaacctagtgcacactaagcatgcagacatatacgttgaattcatggatagaaaggtgaatggatagatgactggagaaaagggatacgactccctccatttctcttgatttgttcctgcaagttcaccgatagaagacaggattgaaatagttgagaaaaattatattgtcagagttacagggaatagactttctaagttaattttttcttttaagtttggagaggcttatgcggtacctgattcatccagcaaattaagacctgccaactttttgataatctcgtcaataaattacagaacaattgttcctttcaagatttattcaaaacgtgtcaactctgcttaattaagcactttgatgatttaagaaatcttggtgagtagcttagtaggaagggaatttgttcattcatccctctctccctctcttttcccctccctccataccattcctcctttcctctactctttccttcattatatatataccattgtatttgatactgtgagaaataattttaagaatgataagttaccagtcccagttctttataaatttaggctatagttggtataggagctatacatatgaaaaatacaaatacaaggcaaatgattaatgtcagttaaatagtgaagacaagaatagtgaaggcagtaagtgctatgcacdgtagtttagaggtaaatattgaactggttggagaagatctagaagagattacgtaggatgggttactggggagacctgcatagatttccagtattttctgagatgagtattttcaatgtggttctattttattttaacatattttgaattccaggaatgttggacatatcacattgaaaaataatgactataaacatatgtcagaaataaataaaaatgattttaagtactctgtcttcattagaatattaatacttgcagttaaactttacaagaaaaagactgatgattataactagcaatgtaatataatgtaatatagctagcactgtgataaatagctcataaaatgtaactcagatgtgagttgaaaatrtgaaaatttgaggaatttctaagtgttggttatcacatttgcataatgtgaaagtcttgagtttgaagtgaggctacaccatcttttctttctttattttgttttgttttcttttgttttgttttttttgatacagagtcttgcacccaggttggagtgcagtggcgtggtcttggcccactgcaacctctgcctcctgggttcaagcagttctttgcctcagcctcctgagtagctgggattataggtgcgtgccaccacactcggctaatttttgtattttcagtagagacggggtttcatcatcttggccaggctggtcttgaactcctgacctcgtgatccacctgccttggcctctcaaagtgctgggattacagatgtgagtcaccatacctggcctttttttttatttttgagacagtctcactgtatatcccaggctggagtgcagtggtgcgatcttggctcactgcaatctccgcctcccagattcaagcgattctgcctcagcctcctgagtatctgggattataggcgcatgccaccacgtccaactaattgatttgtatttttagtagatacggggtttcaccatattgaccaggatggtctcaatctcttgacctcatgatccgcccacctcggcctcccatagtgctgggattacagacgtgaaccactgcgcccggcctacaccatcttttgtttgcagtarcattgttttgaaaggcaatgttctatgggactgaagaccacaggcttggagttaaattgtctgaattcaaattctgtctctactatttgctggctgtgtgatcttgggaaacttgacctcttcaagtctttatcatgatatttagcacacagtaagcattcagtaacatgagtgattactactgtcttagcagttctgcttctcagggtttatttaaataaacagatgtaattggatttctcagctttgtatgccatttgaaactggatttctcaaaccacaaaaggtaaagttaaggaattggatgatctgtgatttatagtctactaactgctttttctagtgtttgcccacatatctgtgttggtgaaatgttgtgtatcataccccaagtcagtgttacattgaagagataacttcaggtaggtaaatataattgcttaagtgttctaaacaagcgtatgatttcttctttctctttttttggcaggaaatccttttgtactattgctcattcatacttgttcatcaaagcctggagtccttaaggacagaatttacctctaaacagaaagatggaaactaaagtacatttattctgccaggtatttatttaaaacagtttctaaagatttcttctttcttctttttaaaattagtttacattacctcatattcataatcagtaagcaaattcatagagtaatagttataaggaacctggccaagtaactgagatgatgtttgagtcattttagtgaacatgtattgaactcccatccctacaacccatataatactgagagatcttctgtggtgtatgatgagagtattttggtggggtacggacctggataatttttgtggagatcaaaagggttaaacttacatgagaggttgtagataatgtaattaatgatgtgagagtataaccaaaaaataatgtagaggacatcaaatttctttagccctcttatctgtacttcagagttttatgcccttctgtctttttagatgcctccrcctttttttgctagtattgtgtcaaataagacaagttttttcaaataaaaacaaatctggacttagtaagcagagactttattcaaaataattattgcaagagaaaaaagggactattgaaattggaagaggaggaggactattgcaatggaaagaatgctgtgaccgtaagatctgyaggtgtctcaagggttgggcagaagttttcttttatagagagacgctggaaagaaccaggtatggggaaattggatgaaatagtagaatgattagataagtagattggagagtattttatcatgaagtcagtctattatattctgattatcagtggggataaaacagctaataatttatgacgcaaagaaagggaattttgagggggtgtgtctggcattgtcataagtaaacaaggggggcattccagagtcttacctaagtcatatggggaggagtggtttgcagtaagccattttccagaacacaaaagggtggggggattcctttaaccctcactgttttctgggagtttagggctcaagtgaaattcagcattgtcaattgagagtcctaatcttttaaatttatccttgttaaagatctgacgctactgtgtaaaacatgtacctatactatagtctgaaaaataatctcagagactcttgaaaagtgctgagatatgtactttatatcatatatatacacatatatacatttaaaatttacctttttatacctactactttgttgattttgcccttataaactgattttgaagatgaattcttaaaaattaatattaaagtatcataccggtttgttttccttagactgtataatttatacttcacagatggctcaccttttactacaatgtttctgagattgttttcttcttctgtgtcaaaagcttctactctttgttttcattcacttggcctttggtaacaggtttttctgtctttttagatttcctaccccttttccccctcagctttctattttgggtcatttttttcaatctctttaggaatcctttcatcatttgtaatacacatctcatcaaggcagcaaatcaaattgcctttttgaaacaacttaaaggtatgcctttgttataagacaaatgatgcagattctaaaagtcactgaaatagttctgttaatttccatcctgtggaaacagagattctctctaaacttccttggtaatctttataaattgtctgtgtaatcttcatggtcacctttgggttcaaagactcaggactaatgcacctttgatcgactggatgccgccagttgtcttaagcaaacagccagatttcaggagagaatatttccaactgcattcttctatttctaaacgtttattgtcactaaactctatttctttttgggggggtggggagtggtgtctatttagaagcaatatagcttctttttttttaaatataggctttgttttttgttattttattttttgtagagaaagatatttatttatttaatattttttatttcagtagcttcaggggtacaagtggtttttggttacatggctgaattatacagtggtgaagtctgggcttttagtgtacctgttacctgaatagtatacattgtacccaacaggtagtttttcatccttcacttccctgtcccctctccacttctgaatctctaccactccatatgcctttttggatccatagcttagctcccatttataaatgagaatatgtggtatttggtttttttgttcctgagttacttcacttaggataatggcctccagtttcatccaagttgctgcaaaagacattattttgttcttttttatgggtgagtagtattccgtagtatatataccacattttctttaacctctcatcagttgatgggtacttaggttggttccatacctttggtattgtgaattgtgctgagataaacatatatgtgtaggttttttttttgatacaacaacttttttttccctttgggtagatacccagtagtgggtttgctggattgaacgatagatctacctttatttctttgagaaatctccatactgttttctgtggaaattatactaatttacatcatcccatctgcaccaacatttattgttttttgactttttaataatggccattctggctggggtaaggtgatatcttattgtggttttaatttgtatttccctggtgattggtgatgttgagcatttttcatgtatttgttgaccatttgtatatcttcttttgagaaatatctgttcatgttattttcccactttttaatgggagtacttgtttttttgctgctgatttgtttgaattccttgtaaattctggatattagtcctttgttggatgtatagtttgcaaatattttctctcattctgttggttgtctgtttactgtgttgattattatttttgctgtgtaagagcttctgaatttaattaggtctcatttatttatttttgtttttgttacatttgctcttggggtcatagtcataaattctttgcctaagccagtgtccagaagagtttttcctaggtagtcttctagaatttttatggtttcaggtcttaaatatgtagacttttttttagagcagttttaggttcataaaaaaaatgagcagaaaatagagagttaccatatacctactgcccctatacatgcacagcttaccctgctatcaacatcctgtaccagagtggtacatttgttgtaattggtgaaccaacattggcacatcattatcactcaaagtccatagtttacattagagttcacttttgttgtacattctatgggtttgaacaaatgtattatgacatatagtcaacattatagtatcatacagaataatcacattgccctaaaatcttctgtgctctagctatttacttctccttcccccatcccctggcaaacactgattttttactgtctccatagttttgccttttccagaatgtcatatagttggaattatacaatatggaaccattcaggtcgggcttttttcacttaatgtgcatttaaagtttttaaatgtattttcaaggcttgatagctcacttctttttagcactaaataatatcccattctctacatttagcacagtttatttattaattactgaaggacatcttgattgctttcaagttttggcaattatgagtacagctgcwataaacatccaattgtaggtttttatgtggaaataaagtttcaacttgttagagtaaatactaacaagtgcaatagttggattgtatggtaaaagtatgtttagttttgtaagaaactgccaaactgtattccaaagtggttgtaccattttgcattcccatcagcaatgatgagagttcttgcttcacatccttgccagcatttgttgttgtcagtgttttgggttattgccattcttttttcttaattgagttttttattattattttagattgacaaataataattgtgtgtattttgggggcataatgtagtattttgatctatgtatacattatagaaatatttaatctagctattagcataatcattaccaactttttttgtggtaagaacataaaaaaattttagtgattttgaagtatatattatttactaaccatgttcaccaatgcattagatcactaaaacttgttcctccagtctaactgaaactctgtgccctttgatcaatgtcttcccattccccatccctcttcctcccccaaacctctccaccccccagcctctgataaccatctttctactccctgtttctatgagaacaacatttttagatttcacatgtaagtgagatcatacagtgtttgtctttctgtgcctggcttattttacttagcatagtgtcttccagttctatccatgttatcgtgaatgacagtttccttctttttaaaggctgtatggtattcatttgtatatattcaccacattttctttatgtattcatctgttgatggacacttaggttacttttatatcttggctattgtgaataatgctgaaatgaatatgggagtgcagatatctcttcaacatattaatttcaattcctttggatatatacccagaagtgggattgctggatcacacggtaattctgtttttagtttttgaggaacctccatactgttttctggaatggctgtactaacattcataccaacagtgtgcagatgttcccttttctccacatccttgccaacacttgttatcctttgtctttttgataatagctgttctaacagaatagctaacagaatatctaacagaatagtgtgagatgatatctcattgcaattttattttgcatttccctaataattagtgatattgagcattttttcacaaacctataggccattcgtatgtcttcttttgagaatgtctgttcagatccttcacacattttttgattggatagtttgttttcttgcttgagttgagttccttatgtaatttgggtataaatcctttatcgccttaacagatgtaaggtttgcaaatattttctccctttctgtgggttgtttctcacctgttgattgtttcccttgctgtacagaagctttttagtttcatataatcccattttccatttttgcttttgttgcctgtgcttatagagtcttatccaacaaatcattccccagaccaatgtggtagagcttttcccctatcttcttgtaactttacagttttaggtcttgtgtttaaatctttaatgcattttaaattgatttttgtatatggtgtgagataatgtcccaatttcatttttctgcagaaggatatccagttttcccaatgccatttattgaagagactgttctttccccattgtgtgtacttggcacctttgttgaaaatcagctgactgtaaatatttggaaaatttctaggcttcctatcctgtcctattgattggtgtgtcctattgattggttatgccagtaacattctgttttgattactatagctttatcatctgttttgaaattaggaagtgtgatgcctccaactttgttctttttgcttaagattgctttggctatatggggtgtttactgtttccatatgaatgttaggatttttttatttctgtgaaaaatgacatcggaattttgagaggaattgcattgaatctgtagatatcattggaaagtatggacatttaaacaatattaattttttgaatccatgaacttgggctattttctcatttatttgtgtcttcttcagtttcctttatcaaagttttatagttttttttttgttaaaatttcatcattctaacaggtatgtaatgatggtatttccttttaatttgcagttccctaatcccattataatgttgagcctcttttcatatcattatttaccatgtttctgtgtatcttctttggtgaggtgtctgttcaagtctttagctcattttaaaattgagttcttttttattatgttttaagagttctttgtatattttggatgacagttctttataaaatatgtcttttgaaaacattttctcccagtctgtgacttgtcctttcattgtcttgatatggtgtctttcacagagcagaagctttaaatgaagtttaacttatcgattatttctttcatggatcatggctttagtttgtatctaaaatcgagttaatgtttataataaaaatactgctttgcaaagagtatgataaacttttgtatctttcttggcaaagagtatgataaacttttgtaccttgatgccttaagagctagatccaggctgggagaggtagctcatgcctgtaattctagcactttgggaggctgaggtgggaggactgcttgagctcagaagttcgagaccagccttggcaatgtagggagacctcgtctctacgaataataaaaaattagccacgcatgatggtgcatgtctgtggtctcagcttctcaggaggctgaggtgggagaattgcttgagcctgggaggtcaaggctgcagtgagccatgattgcaccacggactccaccctaggcaacaaaaagagaccctgtctcaaaaaaagaaaaagtgctagatgcaataactgttagacatattcataaatgatgttcttttatagctgtataatgcactaaggataattggagttatttagagtatgtactgaatctggaaaaataatacattagtgagtaaaacctttttcaacaaaattctcttcggtagcactatttgagaaagaatatcaatctaaaatgaatgattgacccagaatgtcatatttaatatgtatgtgcaaagaggacatgcttgattgtggctcttatattccccaggcagaggaaaatattgacttattagatgatggctctaattcttttgcaactgacttgtcatcaggaactattaaccacaagaaatacatcaagttttctaaaacaatagagaaggaaatttcaccggaaattaggagtttgagcccagaatataaaaaaatgtaagttaaaaactctgaacttactttattgaattatacttttgcaagttaagaatgccaaaatgtagctgtggcttatgcgttctcataatgtaccatgtgtataggatcatgcatatttgtggtcattctttcagtagcataattttaactcctaaatagctgttcttacattttttctgacttctctcacagccatctataggcttccatgttgtctaagttggttctcacattgttataaagaactacttgagactacgtaatttataaataaaagaggtttaattgctcatggttctgcagactttacaggaagcgaggctggggaagcctcaggaaacttagaatcatggtggaaggggaagggggagcaagcatatcttcacaaggccagcaggagggagagtgaagagggaagtgccacatacttttaaacaaacagatctcatgagaactcactcagtatcatgagaacaacaagtgggaaatctgcccccatgatccaatcacttcctaccaggtctctcccccaatattggggattacaattcaacatgagatttaggtagggacacagagtcaaactatatcacatgtggaagcctataagtaagctataagctaactggaatcataggattctagttagaggagaacagttatccatatgtctgttaagtttgtcttaaagagaatttaagaaggaaacagaaggttctttcctctaggcttggctttgtgtcttccatgaaattaagatatttgaatagtttttttttttttttgagatggagcctcactctgtcacccaggctggagtgcagtggcgcagccatggctcactgcaacctccacctcctgggttcaagtgattcttctgcctcagcctcctgagtagctgggactacaggcgtgcgccgtcacactcggctattttttttttttttttgaaatggagtctcgctgtgttgcccaggctggagtgtagtggcacgatcttggctcactgcaagctgcgcctcctgggttcaagccattctcctgcctcagcctcccaagtagctgggattataggcgaccaccaccatgcatggctaattttttgtatttttagtagagatggggtttcaccatgttagccatgatggtctcgatctcctgacctcatgatccgcctgcttctgcctcccaaagtgctgggattataggcgtgagccaccgcacctggccaattttttttttttttttttttgtatttttagtagagacgggatttcaccatattggctaggctggtcttgaactcctgacctcatgatctgcccgcctgagcctcccaaagtgctgggattacaagcgtgagccactgcacccgaccaagctatttgaatcttttagcagttctttcttgtatactgcattgcctggttgccttttgttagtcgtagaagttctagcattttaaatgcatgtaggagaaatactcaatctgtatttattatttataaaatgactaaaaaataaaaaaaaatctaaaagcctctgggaaaacattcagagcttatgtcactttatctttaactaaatgctcatcttacctgttggtgaaactggaaattacctacacattgtgattggagaggcacctaaataaaaatctcctctaccttccagaaatctgtatttcacttttatttaatctaacattttcaccactactcctgtttgttagatggcaaaagatgaagcaattatttctagaagactacaataaaacttgttacctaggaagaaaaggaaggtcgtgggaggttaggaagaaaaggaaggtcgtgggagcatccctttaccttcttccattagctttcttcaagataggttagcactgtgggaagcacatgcctcaaaagaatggggtacagtgcatgttttcccttgtaagtgggagctaaacaattcatacacatggacatacagagtagaataatagacattgggactacaaatgtaggaggaggggtgagggttgaatttggtgatgggtacactgaaagcctaaactcaccacaatgcctatgtgcatgtaagaaatctgcacttgtaccctctaaatatataaaaataaaaaaaatttaaaaatggggtacaggacaaatgtttttacttattcattatttataccaaatcatccttattctatgaaatgtgtgaagtagctcataattaaaaaatacacttttgtttacctaaataaggaaactgaggcaaaattaatataagtagagagtttgtttaggcccaggttgaggactgcagcctgggaaacactgggaggtactctgaagaacaaaggagaggttcaatattttaaagaaaaaaggaaccaatcaggagatgggttgattacaaaagttgtttttcaggaattcttactggcttacagaaataacattgattagtgattggctatatattgctgaactgtagcgtatgagttatagtatccagtgtatggcattgttaggttaatttgtggctacttggtgacagtctagagtccacatagcaggcaactttgaaataattgcttagctcaaggggatgtgagacagtgactcctatctcattttaatgcctctttgggcctgataatttaaagaggtcttgcattcatcagattaaaaatttattttctttatcattttttgaaaaaagatgaaagatcaaaagtcatgtaatggagtggaagtcatgattatattagaaataagaaggctcaacttcaataaggatatatgggggatataaagcaccagtaaactgcaggttgtgactcattaatgggtaatgggtcatgaaatcaggttaggaggtcactactagtttttttttttttttttctttcttgagtcaggagtttactctaccaccctggctggagtgcagtggcatgatcgtagctcatcgcagcctggaactcctgggcttaagggattctcctacctcagactcctgagtagctaggattgcaggtgtgcaccaccacgcctggctaatttttaaattttttggagaggtgaggtctcactatattgcccaggctggtcttgaactcctggcctgaagcagtcctgccactttggcctcccaaagtgctgggattacaggtgagagccactgcagctggtttactactagtttttttttttaaataaataagttagaatagaattgaaaacattagagtgctttttcctcctcctctctctcccttgctttctattgcacctcttatctctgtatatgtatattgtacctcaatagaaaatttacttttgactgtgggtcataggcaaaatagttgaaagtccttgctttgagactagaggactgcagagggatctaatcatatggcagcttcagggaagtgaagagcaaagtatgggggttcacagggtatgaatttgggagattggatttaaagggatagtgtgtcaaaaaagcaagatactttttcttggagaaataagtcagtaaaaaagagcagggtacaccataaatacatacaattttatttgtcaattaaaaataaatttaagaaacaataaatatatataattttgtctatcaatttaaaataaaataaataaataaaattggaaaaaaaggccaaggtacttgctaaagaaagggagtggcatgaattataatatatttttttatgtcacagttttgcttagggctgagttcacctgaagctgttgtagatataatctagttagtcactgtcctgatgggttgttcttgaaatttaagtctaccctagattacttgaagcactttctaagagtatgtgtcttctcttctaaaatttaattcaaatgtaattcataattacattttatcttattgttgtgtagtttatggcagtggtctccagactttttggcactagggaccagtttaatgggagataatttttccatggacgaggggatggggaggaggcaggggtggtttctggatgaaactgttccacctcagaagatcatcaggcattagtttctcataaggaggcaaaacctagatcccttgcatgcacagttcacaataggatttgtgtccctatgagaatctaatgccgctgctgatctgacaggaggtggagctcaggtggtaatgcttactcgccagccacttacctcctactgtgcagacgagttttggttcatgggccagagtttggggacccctggtttgtggaatgtttrtgttatgaaaggtcttgagatcgtaccactgtgcttttagcctgggcaacagagtgagactccatctcaaaaaaaaaaaaaaaaggtttttgacagtccaataagaagaggaaaaaggagaaataagagaaaaccaaacaataagaaagaagaatgttgattaaaaagaagttcagcttctagtgcccaaactttaatcttgaaataccatttcttattaaaaggctgtttagagaaatgctgattgcatgtctgtgaaaggaaatgtaaagtaagcctggaacatcttgtcttccggagataaggaaactattaataaaaaagactactatcagggattcatcagaaggactcaagagcctactggaagagtctcccaccttttcctataaaagatgagaaaattagagcatcaataagtataataatttcagggaattaaactgcatcaaatatatttaagtctatgcgttcaaaatggtataaaattattttgtcatttttagaggttataagtgagccaagtctttgttatgaaaagtggtaaataaaggaaaacaatagagcaattatcttacctttctttctttcttgttcttttttttttttaaagtcagttgaatctgtctatatcttgcctttctatatgaactggtaccactaggcaacccaatagtacatgagagaaagtgtctatttgtagaaatattctagcagccaggcattgtggtgtgtgcctataattcagtactcaggaggctgaggtggggcaatcacttgagcctgggagtttgaaactgtagtgtctattataatcacacctgtgaatagtcactgtactccagtctgggcaacttagcaagattccatctctacacatacaaaaaaagaaatattctagctaatgattgaaggaatgatagatttataatataaccactttgcagtctctcatgattttttatttttatttttatttatttatttttgagacagagtcttgccctgtcacccaggctggagtgcagtgatgcgatcttggctcgcaacctctgcctcccaggttcaagcaattctcctgcctcagcctcctgagtagctggaactacaggcgtgcaccaccacacctggctaatttttttttttttttttttttttttttttagtagagacggggtttcatcatattgtccaggctagtcccgaactcccaacctcaggtgatttgcccaccttggcttcccaaagtgctgtgattacaggcatgagctaccatacccagccagtctctcatgatttactggatctattatgtataagtagctgctaataccacaaatagccaattggacattatgtgcttcctgatggaataacgtcaccacctagagagtggttttgcatctccctcaactattgaatgttaatatgttcaagcctctagaatcctacaaccgtggtgatacaatcaggaaaatcctgactgtggaaaatctacaggatgaatgacctagtaataataattataatgataataaaaggtatagaaggagaacttatagatgaaaagaagttaaaaagacatttcagtcaattatgatgctgggattttattgagtcctgatgcaaaatgttaaaaaattttatgacatttacgagacaactggaaatgtgaatggtgcctgtatatttgatgatattaagaaattgttaatttttagctgtcatatggtgttttttgttttgttttgtttttgagatggagtcttgctgtgtcacccaggctggagtgcagtggctcaatctcagctcacttcccaggttcaagcgattttatgcctcagcctcctgagtagctgggactacaggcatgtgtcacaacgtctgtctatttttttggtatttttagtagagatggggtttttcaccatgtttgccaggctcgtcttgaacttctgacctcaagcaatctgcccaccttggcctcccaaagttmtgggattacaggtgtgcacctccgtacccagcccaatctctacaaaaaaagacaccttgtagagattkctattaaaatctttacagatggaaataatatactgtgatttatttcaaaaataataagggatgggaacagggatgggrtatagatggaataggattgaccactgttgaaactgggtgatgggattctgtatacttttgtatatgttagaaaatttccataattaaaagttgaaaagaataagtaaaaagaaattcaagaatgattccaatttctgtgtcatttagatttgaaacatcaataatcttttgtggagaagaaaagtcctctgatttttcaggagaaaaaaaagttgggagaaagagtttacaagtacaacagcacagtaaaagaactgaggtaaataaagatttggaaatttttcttttaccttcaaatattttccttagccctcaaacattcccttaaattttttagtccaagtgttgaaatgtcacagtcttaaatatcactacctggtcttgcttctcctcttctgttcttaattctcctttttcttctccttaaaaaaaaaatagaacaaggaatcttttcaggaatttatgaaaaatttgtgttttttccctattaaacttattttttgtcttttttactgtgctctctgctaacatttttgcttttttaacaggaaccctaggtgttctttggtttgtggcagcataactccaatctctgcctccatcttcccatgagtcttcacatggcctcttttcctgtgtctgtatctcatctccttcctttctcttacaagcacgtctgtcattgtatatttcatttcaagatcttaacttgattacatctgcaaatacattttctccaaataaggtgacattcacaggtttcagatattagaacatggaatatctttttgtgtagtcactcactatgatatacttagaggtatatatccttttttcccctctgtcttagtatttgctgtgcttcttaaatctgagaatgcatgcctttcttcaattctggaaaattctaatatgttatcttttagatatttcccctctttcaatctctttactgtccctttgtatcttctgttagatgtgtattagattttgtcatcctgttttctatattctttaatattgcttcatattttttgtctattctgtctctctattttgttctttgtaatttctccccatctactttctagttcacttattctttatctagctgaatctaatctacagtttaacctttcctctgagattttaatttcagtgattctattttttacctccagaaattttatttgatggttcttaaaatatgccctgtgtcatgttttttgctcatattctatagttatttcaagattggtatctgatcaattcactgtatgaaattcttgggggatctaaatgttgtgtttgttgttttgtctgattctcactcatgttaacttgttctttgggtgttatatatattttgtacattctttcatatatagttgatctaaatctgtgggaatcttcagtttgcccttcttcaagagaatttttaaaaagaaaatttgcttttgtctttgccatgcacttcagaagtgttacaaatctgaggtcattttaaatgaattttttggtttctgtttccctggcccatatatttagtgtagatttgagttccaaactcatgtatgtagagttatgattatgactaatcaggaggaatagtctttctttttttctaacctggagctgggatagagacatgttttaatcatactttttcactggggaataagttttttccttccccactcttgctgaaaacattgtcttttgaagattttggttccgtatggcatctcagtaccaattcctgtcaatcttgtgtaacgtgagagtcttttttccacatcttgcatggtcattaaaactcaatgctcagggttccatgtaaaagtgaagacacctgtaattagaattcttatttttctaaagtgctactttcctatccacctagtgcttgcctttttggaatcatgtttatacatgcaatcttaagtggataatttactcaatgatagggataatcgaaaacaaaattacctgtatcatttgaataactgtgttgattctccacattgcacttaagtcaaagcctttatatgtagcctagagtctggtggctgagtcttcttgttctctctataccataggttttccctgctttgtaaaacccattactatatagttaccaagtattaatgacatgattaactgcatacttaagaaaaccatggctttgcaagagaacattgcatagtttattaaaattttagtttatattaaatgtaatttaattacaaaaggcaattttacaccagaagcataattaatgaggagccaaggtatgattaattatcttttaagagttgtatcatccaagaatgctgaattaccagtgtcactcacctcaggcaccaacatacttgcatttggctctagattatccctccttttctgaagctgtcaaaggagaaggtgacaaggaaagaaaactctttatgcaagttgccgaatcagtacagcgttcacaagacttcatcacctctttgtacatcttctgcaattactcggtatttaaatccttgtactctattttttaaatgttgggttcagacttgggtgtttctctccagaatcatttatcccttccacataaagaatatgaagtagtttatgctaattatgctgttaggattgtgtagagataagagcactgtatatggaattggaagacttagatttgagtccgattgacctaacatgcttagacttttgtaaaatttacatctctgggcatcactttccacatctgtataaggatcttgtactaaatgaactcttaagatgtcttccaacactaacattatatgatttcagcaatttacatgttatagtattagataaatcatcttttccagacatttttcctgataggtgatggaatctgagattctttggctgtttaaagatgttcttgtttgctttattataataactttcttaaaaatttgctgtgacttggattaagaataggaaaaattggaccacagtcgaaggatagtaggtcatgggcactatttgcagactagggtgaattctgctttatagaaaaatatctcgaaaagaaataaggtgagacttctgaagtgaagaatatggaattttccataacttggacagttcttcaagaaaggttcttatgaatctcagactattggtaagtttgctaatattttaaaatggaatttgcatattttcattgccactttctaatatggctgtttctttgacagggaaaaggaaatgctgtctaacctctacatgacattatatgatgaagtaacccatggatatttacactcaaaagaattaagtggtaataagaggttctaaaatttcttgaatacatttcctggttatgtgctttttaggaattgtttcagcagttagtgcctcttcatctactcctaatggcttatggtatcaactgataatacatggtatggcaaatgctgcgggctgtgaggaagcaaaagtagrtagtttaatccataaatatctttggttgtattggtaagatagggaaaatataatatgtagcttatactagttcaaatgtattttttggaaaaatgtctgcatatkacatcccatggataaattagtaagtgctggagtcactgatatcactggaatttagtctttggtatcttagtattaaggcttatactacccttcactccttcatgacactgacctctcccgtatcttgggtttctcctttatacttatggaataatttcacatagttttccttttaccttaactctggttgtcatattgtgtatcttagtgtccaaatgggtgactcatacttctggagcttcacacgttcaaaaccaataattttaccttgattctcctgaccaacactgatggccacaaattacacattgtcattatgtgaaaatctcagacgtcaacgtcttattcttcactcacaatctcttatacttccagctctttttatttagaattttatttccttgacctctccatttggtgccactatgattgtatgatttccaacctcagctgcccttagcaccagttggtattccctttaagttttggtgtgatctctcctgtttcctttggtatctattccaaaccttcactactctcctcaaatactcaattatgtcacctatccaactttaaacatttaaaaatgttttacttaattaaaataaaattaaaacttgctagtctgaaatctatgaaactgaatcttttctcccctatttcttttgaaaaaaattttattgtggtaaaaatatttaacatgagatctaccctcttaacagattttaaaaatgtaagttattcttatctataggcacaatattgtacagtatttctatagaacttattcatcttgtgtaactgaaattttatactcactgattagcaactcactatttcctcataccccctgctccaggcaactacaattctattctttgttccataagtttgactattttagatgctttatataattggaattctgtagtatttgtccttctgtaactggcttatttcacttagcataatgtccttcatattcattcatgttattacatattacaggattttcttctttttaaaggctgattgatattctgtcatatgtatataacgtactttacccccccccccatttatctgacatttaggttgtttccacagatatttagattgttttccataggttggctattgtgaatagtactgcagtgaacaggggagtactactgtctcttcaaaatcctggttttaattcttttggataaatacccagaagtgggattactggatcatgtggctttgctttttcatagagagttagtaagggctgttgggaagcttcctaaactccttgatattcttacctacaaacaacattcatatcctttcatcttgtctcattggaaaaggtgccctttcaccagactaatcctttcatttcttgattttcttctgctttctcaaggcctatgctttgctaattttatactcaatattttttcagagaagccttttgaaggagttgttttcattagttgctgaattttctcacttcccatttcatggaaatctggcttccacctccaaaattctactaaaacttattttattaaagccattattatcaactctttagtcattattttgtatttatcactgttagggctaggtgaggtggctcatgcctgtattcccagcactgcggaaggccaatgtgggaggatcatttgagactaggagttcaagaccagcctgggcaatatagtgagatcccatctctacaaaaaataacaaaaacaaaaaattagttgggcatgttggcacacagctgtagtcctagctactggagaggctgaggtaggaggattgtttaagcccaggatttcgcgacaggagtttgagactgcagtgagccatgattgcactactgcattccagcctgagcaacagagaaactctggctctaaaaagacaaacaaaaatagcactatcatcaattgcctcttttctgaaaataaagtgtagtatccactgaaccaaaaaattcagttcaatagacatttttttgagaatttcttaattaggcactagaaacagaagaatgaaaaaatcttgctccatagaagctgacagtttagtgagggatattgacatgcaagcaatcataataccaagggctttcactgagatacatagtaagtgctatgggaacacagaggaaaaatttaccattcctagggcaagttgtggaagcctttgcctatgtgcccttgtgtgacttgtctgacagtttctgaaagttctttaggaaacaggttgaaagatttgaatattaaaagattgaagagggtggggtaaaaaagaaacaagtttgaaaggctgaaaacacagattggctccctttttagtgattattatttttttgagagtgggggraataaggataattattctttttgattaaytaactaaatgttttgttatgtgtgtgcagcacttcataaagcctgtaaaatttttagtaaaattcgaagtggtaagatttatgtgaatgatcttccagtgatcctttgcatcttgagaatttctataagtgatttagaaatgcgacaggcactaaagactgttgatattgatggtaagttttatcttttcagtattagtttaagggtctgcaatcataaatatgtttgtcagattaattacaaatgataggaaagctaaaccttaaaatatattgtaaaaacatcatttttggtcatattgtatgttacaaaacatttttacatgttacaagaacattacttacaataatgatattgaaaattggcctcaggtttatgtaattggattgattaattactagactggattatggcatattctcattattgttccacgcatggtctaatcttatttagttacgtaatttaaataatgtaataaatacttgacccaaccacccaaaataaaaagtaggaccttgtcaataatttacatccaactgtaaactttcctaagcaacctattattctgttttccccaacctgaggtaagaattaccttgaatcctatattcattattctcttatttttctgtktaaatagtattattgttatggataggtatttttgtaaaatagttcaaaaattttagttgtttaaaaaactttagtaaacagtttttcattatgtatataatcttttgtttttttcccttaatattatatgactaagatttrttcatattgttgtatactgctttttttgtatgctcttgctcttgccacccttgaattgatcgcctttaaaaattatggttgttctaatagatatacggttattatctgattgtggttttaatttgcatttcctgaatgattaaataatgttgaatatcttttcatgtgcttgtttgccatttgtatattttttgcccattgaaaaattgtgttcttattgtattttgagattctttatatattctgaatataagtcctttattggatatgtgattcgtagatattttattccattctgttgcttgtctttttattctcttaagaatgtttttagaaaaggaaaaattcatacttttgatgaagtccagtctgcaattttttctttcatgaattgcttttgatatcttatctaaaagatctttgccaacccaaagtcacaacaatatcagaaaacaagtcaaagtagttcattaaaatttggacagatgtttcactgtttttgaaagaaaggagaacccactctcaagttgttacactgaagaagtggagacagacaacttgatagacttttcagtattggagaaagtgcttctgtggtatggaagtgagaacaaccaagccttgtcatttcctctgcagacaattggaagcactgaagtattcctctataggctatttctgctcagatgacattaaattgaaatatagatttatacttgttttcttcgtgacatagataacatcactgatgtaaataaaccctgtcaaagttgggctcgtttatttaatgacaggagaagatgaattcatagttatttaacttgaagaatcttgaagaactacaaatataaaaattagtcttgagcaaagagcactgcagtatctacagtactagtcccatagcattcttattactgctggaacactatttactacctaattacaatatgtaaatttttttctggtaaatattctttttacattctatatataatgtcgactgctctgtgtatagataatagtattctaatgtcattagttaattctatttacatttttagttgccacttttatcttatgttcttagtgagtttgctaataatgtttgctgatggagtttttttcacttctgttttggaaccatttttatagttaatggaatgctggatttttcaaatttccttaaagctgtggctgatgtttcttttttttttttttttttttttttttgagacggagtctcgctctgtcgcccaggctggactgcggactgcagtggcgcaatctcggctcactgcaagctccgcttcccgggttcacgccattctcctgcctcagcctcccgagtagctgggactacaggtgcccgccaccgcgccyggctaattttttgtatttttagtagagacggggtttcaccttgttagccaggatggtctcgatctcttgacctcatgatccacccgcctcggcctcccaaagtgctgggattacaggtrtgagccaccgtgcccggcctgatgtttcttatttggtctctcagaatccaggtaaaaaagacttcttcaaaagtatagaagataatacttttgtaactgattttggggttgggaggggtggtattttatatatgaattaatttatattttacaaatctcccactagtgtgggctgagaaaaatgaggagtgaattttgtcataaaaggcattacaaaacctggattatactgccccaatattcaaacattctatctctgatctctagttttcctgcacattaactgctagactaattctcttaaaatactattttcaccatgtcattttcctgctcaagaatttagatgctcttcctattatcaaatgaatctatagaggccaaactctcatgcttagcctcctcaccccttcataattttgttcaccactcttacctttatcacagaacctttcccaggcaagaaccacatactcgttagtcataaatctccatacatgccaatataattattactcccacgcctttgtttgtgtgtgtgtgtgtgtttttttttctgttgaaatctctcatctgttttcttcttcatccttaacagtactttcttccttttgccaggagtcttgtttgtatctcttcctaaaaatttcagatacttatgggtctcctagtaacctttagtttacattacctatacattataaataaagtggttggaaagggtattcgtattaatggtagaaacagtacctccaaaaacatgaaatctgtggtgttcatgacctgatgttagcaattcttctcttcctccattaggcgatatcaagttcttatgctcggtccttggaattatataattttattttttatttgtataaatttaaggggtgcaaatgcagttttgttacaagatatattgcatcctggtaaagtctggcttttagtgtaaccattattcgaatagttatatattttacttattaagtaatttttcatccttcacccccttcccacacttccaagtctccagtaactattatttcatgctctatgtccatgtgtacacatttggctcccacctataaatttggctcctacctataaatggctttcattatcttaagtgaaacaagtcagaaacagaaagtcagatagttaatagtttcatccatgttgctgtaaaatatgttatttcattcttttctgtggctgactagtattccactgtgtgtgtgtgtgtgtgtgtgtgtgygcgcgcgcgcgccacgttttctttatccagtcatccattgatggacacttaggttgattttatgtctttgctattgtggattgtgctgtgataaacatatgagtgtaggtatctttttgagataatggtttcttttcctttgggcatatatacctagtagtggaattgttggatcatacagtagttctatttttagttctttgagaaatctccacactgctttccattttttcataatgctcgtttggccatttatatatcttcttttgaaaaatgtctattcatgtcatttgcccactttttaacaggattatttgttgcttttgttgtctttgatctgtttgagttcttggtacattctggatatcagtccttgttggatgcatagtttgcaaatattttctcctattcttcaagttgtctgttcattctgttgattatttcttttgctgtgcagaagctttttagtttagttgtctcatttgtctttttttgttgttgttgcttgtgctttcgagttcttagtcatgaattctttgcctagaccaatgtcagtaagagttttccttgggttttcatgtagtttttttttttttttttttttagatggagtctcgctctgttgtccaggctggagtgcagtggtgcgatcttggctcactgcaagctctgcctcctgggttcacaccattctcctgcctcagcctcccatgtagctgggactacaggtgcccgccaccacgcctggctaatttttttgtatttttagtagagacggggtttcaccgtgttagccaggatggtctcgatctcctgacctcatgatcctcccacctcggcctcccaaagtgctgggattacaggcgcgagccaccacgcccggcctcatctagtattcttaaagcttcaagtattacatttaagtttatatccatcttgagttgattttgtatatggtgggagataggggtccagtttcattcttctgtgaatggcaatccaattttccctttaccatttattgaaaagagtgtcctttcaccagtgtatgtttttgtcaactttgtcaaagatcaggtggctatagatatgaagcttcatttctgggttctgttttctgttccactgatttatgtttctacttttatagcagtaccatgctgttttggttactattatagtataatttgatgtcaggtaatgtgatgtctccagctttgttcttttgtttaggattacattggctatttgggctcctttagttccatgtaaattttaagattattttttctatttctgtgaaaaatgacattggtattttgatggagattgcactgaatctgtagattgctttgggcagtatggtcattttaatgatattaagtttttgatccatgagcatgggatgtttttccatttgtttgtgttctctatagtttatttcatcactgttttgtagttttccttgtagagatctttcacctctttggttaaatgtattcctaggtactttgttttttgtagctaagctaaatggcattgccttcttgattggttctcagcttgatactagtgtatagaaatgccaccgatttttgtatgttgattttatctacttaaacattaccaaatttgtttatcaaatctcagggttttttgggaggagtctttagggttttctcagtataagattatatcatcaacaaacagacataatttgacttcctcttttccaacttggatgcctgttacttttttttctcttgcctgattgctctggctagggcttccagtaatatattcaataggagtggtgaaagtaggcatccttgttttgttttggttcttaggaggaatgctttaaacatttccccattcagtaggatgttggctgtgggtttgtcatgtatggcctttattattttgaggtatgttccttttatagtgaatcagattgtatatttatttatttatttattatttttttttattttttgagatggagtcttgctgtgtcatgcaggctggagtgcagtgacacaatcttggctcactgcaacctctgcctcccgggttcaagggattctcctgcctcagcctcccaagtaactggtactacaggcatgcaccaccatgcctggctaaatttttgtatttttagtagagatggggttttaccatgttggccaggctgatgtcgaactcctgacctcaagtgatccgcctgccttggtctcccaaagtgttggaattacaggtgtgagccactgcacccagcccagattttattttgttagaatcaaggatatgtgaatgtgatagtctttatagaactggattagcaagtaaagggcaataaaaactcttcaatacttatttactcatttatgtaataaacattaatatgcctatatatgcagcagtgaacaatatagatatgatgcttggcttgctttttctttttggcattttgatagactccatggcattaggattttcctggttctcttttatctacttggtttttgacttacattttttttcttgtttcagtttcatgtagttcttctctgatcttggttatttcttttcttctgctgggtttgggtttggtttgttcttgtttctctagtaccttgaggtgtgaccttagattgccaatttgtgctctttcagactttttgatgtagtcattttatgctattaactttcctcttaatactgcttttgctgtatcccagaggttttgataggttgtgtcactattattgttcagttcaaagattttttaaatttccatcttgatttcattgttgacccagtgattattcaggagcagattatttaatttccctgtatttgcatagttttgagggttccttttggagttgatttccagtttatttcactgtagcaagagtacttgctgtaattttaattttcttaaatttgttgaggcttgttttgtggcctaccatatggtctatcttggaggatgttccatgtgctgatgaatagaattcatagtctgcatttattgggtagaatgttctgtaaatttctgttagatcaattttttttagagtatagtttaagtccattgtttctttgttgactttctgtcttgatgacctgtctaatgctgtcagttgagtattgaagccccctactactgttgctgtctgtctcatttcttaggtctagtagtaactgttttataaatttgggagctccagtgttaggtgcatatatgtttaggattacgatattttcctgttggactagtcctattattatataatgtccctctttgcctttttaaactgctattgctttaagtttgttttgtctgatacaagaatagctactcctgcttgcttttggtgtccatttgcatggtgtatctttttccacccctttaccttaggtttatgtgagtgagtccttaagtgtcaagtgagtctcttgaagacagcagatacttggttggtgaattcttatccattctgccattctctgtcttttaagtggagcatttaaatcatttacattcaatgttagtgttgagatgtgaggtactattctattcattgtgctatttgttgacagaatatcttgtgtttttttcttgtgttattgttttataggtcctgtgaaatttatgctttaaggagattctattttggtgtattttgaggatttgtttcaagatttagagctccttttagcagttcttttagcagtcagtagtgctggtttggtaatggcaaattctctcagcatttgtttgaaaaagactgtatttttccttcatttatgaagctcagtttcactggatacaaaattcttggctgataattgttttgtttaaggaggctaaagataggacccaatcctttctagcttgtagggtttctgctgagaaatctgctgttaatctgataggttttcctttataggttacctgatgcttttgccacacagctcttaagattctgtccttcatcttgactttagataacctgatgactatgtgccaaggcaatgatctttttgcgatgaatttctcaggtgttctttgagctttttgtatttggatgtctagatctctgacaaggctggggaagtttctctcgattattccctcaaatatgttttaacaaactttcagatttctcttctgctttggaaacaccgattattcttaggcttggtcatttaacgtaatcccaaacttcctggaggctttgttcatttttttttttttttttttttgagacagagtctcgctctgtcaccaggctggagtgcagtgatgcgatctcggcttactgcaacctctgcctcccaggttcaagtgattcttctacctcagcctcccgaatagctgggactacagtcgcgcgccaccaaacccagctaatttttgtatttttagtagagacggggtttcaccaggttggccaggatggcctcgattgcttgacctcatgatccgcctgccttggcctcccaaagtgctgggattactggcatgagccactgcacccagcagtgctgggtgcattcattttaaaaaatgctttcttctttgtttttgttgcctcgggttaattagaaagccttttcttcatgctctgaagttttttcttctacttatttgattctattactgagactttccagcacattttgcgtttctttaagtgtgtccttcatttccagaagttatgattgttttttatttatgttatttcactggagattttcccatacatatcctgtatctttttttttttaagttagacttcacctttctctggtgcctccttgattagcctaataattgaccttctgaattatttttctggcaattcagagatttcatcttgatttggatccattgctgctaagcttttgagtgtgatcttctggagatgtaaaagaacgttgttttgtcatattaccagaattgtttttctgrttccttctcatttgggtagactatatcagagggaagctctgggactcaagggctgctgttcagattcttttgttcctcagggtgctcccttgatttggtgcttttctccttcccctaggggcttcctgagacatagggcttcctggacaaggggcttcctgagagccaaactgcagtaattgttatttctcttttggatctagccacccagtggagctaccaggctccaggctggtactggagagtgtctgcaaagagtcctgtgatgtattccatcttcaggtctctcagccgtgaataccagcacctgcaccaatggaggtagcagggragtgaagtggactctattagggtccttggttgtatttttgtttagtgtgctggttggcctccagccaggaggtggcactttcaagagcacatcagctgcagtagtatagggagattacaagcttgccctagggtcaggtggtgggcagggccatagagctctcaagagattatgttctttgtcttctgctaccaggattggtagagaaagaccatcaggtggggcaggttaggcatgtctgagctcaaactctgtttgggtgggccttgctgcagctgctgtcggggtgaaggtgtggttcccaggccaatggagttatgttcctgggaggattatggctgcctctgctgcctgacaggtcgccagggaagtgggggaaagccagcagcgataggcctcacccagcttccacgcagcccacagtctgaaagactggtttcactcccactgcgcttcacctgtagcaccgagtttatttccaggcaggcggtgagcagggatgagagcttgtcccaggctacaagcctccccactgagaaagcaagccgactcacagttacttgcctgtcccacagagcctgcaagggcatccatctccttgaaggggtctttggattctcttggctttcctgatatgttcctgcagtagttcttggagcaaaagttcacgatgtgagtgtctactaactgactactttttaaatcacaacttagaatagcttatttactttcctgtatttcttgatttttcaagtcctggtttcctattttgacgttttgataattcattttgccttgacaaagcataaattactattttatactccaggctggagtgcaatggcgcgatctcgctcactgcaacctctgcctccctggttcaagcaattctcctgcctcagcctcctgagtagctgggattacaagcgcacaccaccacgcccagctaatttttgtatttttcatagaagtgggatttcaccatgttggccaggctggtctcgaactcctaacctcaggtgatccacctgcctcggcctcccaaagttctgggattacaggcgtgagccactgtgccctgctacaaaacataaattatatgtatgtatctgtggtcagtacttaggagtccaaacacacatataaatctatagtcagaaaaaaatgtaagttgagttccagacagtagggaaaaatgatggataggaggcaggactaacttgcaactttcactcggacagacagagcagcgtgtagagaccactttttgaatcacaacttagaatagcttatttacttccctatattccttgatttttcaagtcctggtttcctattttgaccttattttctgtttgtggacagtgttctgagactaatcaagaactctcaggtttcttttgttccttttaaaagaacacacataattcttgaatatattgttgtaataaaatatccaagcaatatatgtgtataaagatgtgaaagaccttctttaacccaagattgctgcagtttaatactgacctgagaattctttttatatgcacatacatacatataatttatgttttgtcaaggcaaaatgagttatcaattactaggcagagtggaagcaaaggacctaggtctcatagaaactagtaaaaagatcaagcatacagttagaaatcaagagactccctagagaaaaataaaagggaaaaatgcaaatatctttttcttaagagaaaaagaaattttgccaccttgttttgcaggaactatcttgtttaattatatttctcaattatgaaattagtaatcttttaatataattactggtcatttatatattttttctatgaattgccttttcacatatacttttcatttaaaaaactgggttgttcatctcattgatttgtaggagttttcatattctggctattaatcctttgttatgtatgttacaaatgttttcttctagtctgttgtttctcttttaattttgaactggtgtctttggtttttggaatgggactgttacattttatcacaaaatttattattttttctttatgtcttctgagttttgagttgtgcttaaagaggcctttctcacctcaatagtacacacatacattttcatcatgattgtggagtactggttttcaatgctccagggaacctggagatgggtagatgggaatagggcaagtttaaatgccacaaacctcactgttcttattgagactcagtcatttttcttgaagaaattcctcggatagctgcaagcctttggcttattttcagagttttgaaacaagttggttctgataatttttgccagagttctcattgcttttatggagcagagggtttctggaggtcccttcctctgctatttttgttcacttgatcaataatgactagttgagaccaggcatggtggctcatgcctgtagtcccagcactttgggaggccaaggcgggtggatcacttaagcccaggagttcgagaccagcctgggcaacatggcaaaaatccatctctacaaaaatacaaagaaattagcggggcatagtggtacgtgtctgtagtcccagctactcaacaggctgaggtgggagaatcgcttgagctggggaggcagaggttgcagtaagccgagatcgtgtgattgcattccagcctgggctacagagagataccctgtctttaaaaaagaaaattaattaattaaaaaaaagactaatcgaatgaacaaataatgcccagtttttcctccttgactgtgcttatcaaagaacttagtaatcattagtttattatatgatgaatttcaagaaaatctagtctgactataaatgattttccgtctgaaattgataatgggaattgtgttttttttttttttttgtcaaggctaattaaggggtgtagtggtcagggaggatataaatttagcagttggacacggctttcaatctgtttaatttttttttcaattttttttttattattattatactttaagttttagggtacatgtgtacaatgtgcaggttagttacatatgtatacatgtgccatgctggtgtgctgcacccattaactcgtcatttagcattaggtatatctcctaatgctgtccctcccccctccccccaccccacaacagtccccagagtgtgatgttccccttcctgtgtccatgtgttctcattgttcaattcccatctatgagtgagaacatgcggtgtttggttttttgtccttgcgatagtttactgagaatgatgatttccaatttcatccatgtccctacaaaggacatgaactcatcattttttatggctgcatagtattccagggtgtatatgtgccacattttcttaatccagtctatcattgttggacatttgggttggttccaggtctttgctattgtgaatagtgccgcaataaacaaacatgtgcatgtgtctttatagcagcatgatttatagtcctttgggtatatacccagaaatgggatggctgggtcaaatggtatttctagttctagatccctgaggaattgccacactgacttccacaatgattgaactagtttacagtcccaccaacagtgtaaaagtgttcctatttctccacatcctctccagcacctgttgtttcctgactttttaatgatcgccattctaactggtgtgagatggtatctcattgtggttttgatttgcatttctctgatggccagtgattatgagcattttttcatgtgtcttttggctgcataaatgtcttcttttgagaagtgtctgttcatatcctttgcccactttttgatggggttgtttatttttttcttgtaaatttgtttgagttcattgtagattctggatattagccctttgtcagatgaataggttgcgaaaattttctcccattttgtagttgcctgttcactctgatggtagtttcttttgctgtgcagaagctctttagtttaattagatcctatttgtcaattttggcttttgttgccattgcttttggtgttttagacatgaagtcctcgcccatgcctatgtcctgaatggtaatgcctaggttttcttctagggtttttatggttttaggtctaacgtttaagtctttaatccatcttgaattaatttttatataaggtgtaaggaagggatccagtttcagctttctacaaatggctagccagttttcccagcaatctgtttaatttttaaggaagttttttttgtggaaaattataatttatctgaatattttctttttaaaattaaaaatatactgagctctctgatgtgactctaaatattttagaaaatgataaagtgatttagtgtttaatttattttagttaaattgttttaaaattatagactctgacattcaaaagtagatgtcttggggacccccagatttggttcgctagtcagggccatgctgaatatttccttctgactaggttcttttcaattcattttatgtgctaaggattgttaacataagaatatgaaattcctatggagaaataaaagaccaatgttttaaccactattataaagttattttatatcagtggtttgcttgtagataaatatttataaaaccctgtgcttatacaaagttattttcccttagtaggctattgacacaaaatcaactgcttttccaagaaaagctgttgattctcatggtataataatttcttttttgcagcattccaggatgccttgaagattttctgtaggataaaaggtggtcgagtttcaactgatgacgtgtttgctgttttggatagcatgggtatccctataaaccgtgaaattttagaagaagtgacaaaacatacctatattgacagtgagttatttgcattgagatatatatgtccatatatatgtgcatatatttatacatttttttcyggatatcaattttgtgatctgtcctttgcttctccttttttctcttgattcttaccttttgccattgacactgtttactggtgtctatagtaagaaatagtctagaaaaattaaatgagaggtttctaaaattgttatagtttggtatgtttggttaaagaataaaatgaattttaaaaaattcagccttacatctcttttccaagtcatttctggtctttgtggagaagtagtttcttgtagtatcaagagcattgactccacaagttagaagacctaaatttcttgaattctcaattttattatgtagctttgattaaacaattttgctatgcccttcagttgctctctgcacaatgtggattgctttaaacatgataaaaatatttagcaggtgttttgtattacatgtttacttgtaaccagaggatgtcctatcataattagtgattaattgattgattcatttgttttattattgtgggcggcaagccaaccaggtgccgaggcaagagactgagggcacgagctgttccagtataataaaatatgtaaaataagtatagttatactagatatagatctttgatatgattatatatgaatataattaatcattagtttgtagcaattactctttatttcaatattataataatcctcgctctacaatcataacctaggaaaaatcaggccatacagagataggagctgaggggacatagtgagaaatgaccagaagacaggagtgtgagccttctgttatgcctggacagggccaccagagggctccttggtctaccggtaatgccagcgtctgggaagatgtctgttgccaagcagaccgtggtctagcggtagcgtcagtgtcaaggaaaaacacccgctacttagcagactgggaaaggcagtctccctttccccgggggagtttagagaagactctactcctccacctcttgtggagggcctgacggagggcctgactgatgtcaggcctgcccgcagttatccggaggcctaaccgtctccctgtggtgttgtgcttcagtggtcacactcctagtctgccttcatgttccatcctgtacacctggctctgccttttagatagcagtagcaaattagtgaaagtactaaaagcagaaataatggcgtaagctgtctgtctgtctgtctgtctctctctgccttggctgccaggcagggaagggmcccctgtccagtggacacgtaacccatgtgaccttacctatcaatggagatggctcacactccttaccctgcccctttgttttgtatccaataaatatcagcgcaacctggcattcggggccactaccrgtctccgcatcttggtggtagtggtaccccgggcccagctgtcttttcttttatctctttgtcttgtgtctttatttctacactctctygtctccgcacacggggagaaaacccactgaccctgtggggctggaccctacaattattttattatttttagagacagtgtctcactctgttgcccaggctgtagtgcggtgttgtgatcatagcttgctgtaatattgacctcctaggctcaataatcctcccacctcatcttcctgaatagctaggactataggtgtgcaccatcatgccaggctaatttttattttgtagagatgaggtcttgctatgtttcctaggctggtctcaaacttctggaagcaagtgatcctcctgcctcagcctgctgagtagctggaattacaggcatgagccactgggcccagcctgattcattcacttaatgaatcagatagtcagtcatttaatatctactatgcctggaactgtgctaggtgatgcaaagatgaataaaacacacttcttttttttttttttttgagggagctcacgttcaagtgtggaaagagtcaagtaaaccgaaaattaaaatgctccatggcaaatactataatagagtgtacataggctgctaatacatactggaagccttagggaaagattatcagaggggctgatgtctgagctaaatcttgaaggatcagtatgaattaagtagttgaaggtggtagcaaagagtgagaaaaacatcttaagccaaaggaacagtttgtgtaaatatggcagaaaaataatcagacatgacatctttttgagtgggcttccactagtttttgtcatttattaatggtggttttgtagtgggcttttggttgctgatatgtggtctggagatagaatcaggccacatggagttctcttaggaagtcaggtatggtgtgctctggggtgaggcatgagtggaaggatatgatggggtatgaaaatgtaaaatggggattttaaagactattcttaagcctttagggcatgccctaccaggaacaacagaaatcatatatgaaacagctgcagtaccttgctttttggcttatggagttctggcctgggtctccaggtctcctgctttatttggggaggtatattggacaaatgatactaattttatagaattgttatargaattaaatataaacatttatcacagtgcttggcacctagaacagacagaagggtgaggcagaaacctgagagtcatccttggcaactctacttctctattcctcatgcaatagttcccttatttaaagtcttagatacatctttttaaaaacttttctccttttttctatatataagatagatatctcttaagtctttctatttctctctctttttttaactccactstgtcgccagactgtagtgcagtggtgtgatctcggctcactgcaacctccgactccctgrttcaagtggttctcctgcctcagcctccragtagctgggattacaggcacgtgccaccaagcccagctaatttttgtatttttagtagagacagggtttcaccatgttggccaggatggtctcgatctcctgaccttctgatccacctgccttggcctcccaaagtgctgggattacagacgtgatctmtttctctttatctccctatcttagtccaagttcacataacctttcctcaggaccattgcagttcatcctaacaagtatacccctrtccactcttatgttcctttatactgcagccataatgatcttcattcaaatacgggtctgatcatgttattctcctcatataaaatctaataatacctcttgggataaataactcttttagtgtggtttacagggccttgtgggttctggcttttgcccagatcttcagctttatctgagaccatattcttccttgctctctgtgccttcttagagtttcaactatataccatgccccttcttgccaaatagctgttgcatgtgttcatttctcttccttgaacctttttctccccttaggtaattcctacttayactttagatccaaactcaactgtcttttcctcagggatgttttcccagacctctctgagtaggtcagattctcatgttatacactcttatagcactattcgcaattgaaatttgtatttttgtttgattgacattgatatttcaaataagactgagcatcaggtgagcagatatcatgtctgctttagcttaatattgtatcttcagtacctagcgtggtgcttatagcacatattaaccgctcaacaaatatttgttgaatgaatgaataattctgattcctcatgccacatcttccaatcagaaagaacaaaatgttcttcattttatcatatgaataagctggctgtagtttgaggcaaaattcctcataaggaaggtccttatcttttgaccaggaaaataatcttaatagatatgttagattatgagagttaaaacatactgagaaacacctagattgagcaaaaagataagataaagtactgtacataagaaagcaacaggaatttgaaatatagtagtggctcagtagtggaggaagaagatggatagaacctaagagtgagtgaggatagagtaaccatagaactttaggactatagtatgtagttgcttgctgtgcttcttaagaactcccttactcccatcaattgcaaattaccagtaaaagttggttatatacaatagacttgtattagtattgttggtggggagagttcaaggataaagacctataggttctatgttcgatctgcttggggcagaaagaggattgtacctgtagaaggtaataatgtgagtgagatcaagagtccatgggaatagagaaacaaagcaaaaataaaaagagcacaagtgactcaggaatcctcaaattttggtcaaggtattgatttatgttagtatatgctctggggtctgagctattttaatattaaaggaaacattaaccccaggatgccaaaaattttgggtcacccaggtaggagatgttaatttttctgtagcagaattttgcagtaaggaataatataacacagtcctgctaaaagaagacatagcactgcaggtactgttccagcatcttatttttgcatttggtatattgttggagatgataggtagatratatgttcatctttatagatgtttgcaatgagggagaaggaattagccccctgaaattttcaggaaagtccaaggaggatttgctttattaagatatggcaagaagtgccatatggaaaatcagctgatggcagttcttagagggtcaggtattttggtttctgaaatastgtattggtatagcagttttttttttttttctctcatggaggttagagatctggaaattgaactgggtgggaagttgtgactagtgcagtttttgctagaggaggctttcaatattgtggagctacctgaagattacagaaatgtagtgttaatggtcacttagcaccttcagagtaacgttgccttgcatatatgaccttaataattaggatcatttttttcctctcacagtaggtagctgcattttccaggatgaatttcctccagaattatataccttagagtaggaggctgttttgagctccctttaggaaataagtgatacctatgaccatattgattgccttagtttcaaccaggaatcattctttaaggttttgctaagttagatagggaccaagatagtcmtttcagattctcgaacgcgtctttggccactagggactatttaagtaggtaatatttgtttgggagtttcataataggtgtttattattgcatagatgcaaggaataaatttgagcaagagctaatgaatctgtgaacatggttgactaccatactcttattagttgacattggacttctgttcagagaaaggagttttctaaatgaagagcaggtaaaagcaagatggccttttccactggattaatacatgtatggtctaacagaatacttttcagtgatcagattcaagagcttgagggttgaagctttgagttgtcttaggacttaagccatgatctaagaacatgggacatggaatcaatctaccacaagtgccagttactggggaggttatgggaagtgttagaactataatcaaaaccagaatgaggataaataccaaggaaataagaaaccaaaatgtaggaagcaatctctaatcagaaggcaatttagcaccaattttgtctagcatttctttgattggttcaaacacatagtacttgctttgcagtgatttaaaggcctgcacctgaaatacatagtttaccaattttcagagaatcagagtgaatcaggtggacccaacaccaaaatgatactattctttaatttacatatttgcttctcgtggcggcaagaggggcaggatggctgggccactccccttggccctggtcctggcttgccccaccccgccgccatggcccaggatgagggtatatatttggaggggacgtaggacgccggcagagaaggagccgggtggagctgtggtcccgctgaggaagctttgtagatacatgcattgcacccctattttcacaaagcttggctatcagagcattatgaacactaatgaccttaaactcaggttgtccaaagctgagcaagaacacccactacgtttctggaatgagcttgaagaagcctgacaggtagaactttatgcagagctccaggccatcgactttcaggaactgaacttctttttccaaaaggccattgaaggatttaaccagtcctctcatcaagaaaaggtggatgcgtgaatggaacctgtccctcgagaagtactgggcagtgctgcagggaagctagatcagctccaggcctgggaaagcaaagttttccagatttctgagaacaaagtcacagttgttctagctggtgggcaggggactagactcgttgcatatccaaaggggatgtatgatgttggtttgccatcccataagacactttttcagattcaagcagagcatatcctgaagctacaacagttagctgaaaaatattatggcaacaaatgcattattccatataatgatcagtggcagaacagcagaatctacaaaggagttcttcaccaagcacaagtactttggtttaaaaaaaatagaaaatataatctttttttcagtaaggaatgctccctgccatgagttttgatgggcaaattattttggaagagaagaacaaagtttctatggctccagatgagaatggtggtctttgtcaggctcttgcagcctggcatattgtggaggatatggagcaaagaggcatttggaacattcgtgtctattgtgttgacagtgtattagtaaaagtggcagacccacggttcattggattttgcattcagaaaggagcagactgtggagcaaaggtggtagagaaaacaaaccctacagaactggttggagtggtttgccgagtggatggattttaccaggtggtagaatatagtgatatttccctggcaacagctcagaaatgaagctcagatggatgactgctgttcaatgtggggaatattgccaaccatttattcactgtaccatttctgagagatgttgtcaatgtttatgaacctcagttgtagcaccatgtggctcaaaagaagattccttatgtggatacccaacagcacttaattaagccagataaacccagtggaataagtatggaaaaatttgtcttttccataataagtatagaaaaatcttctagttcacaaagaagtctgtggtttatgaaatattatgggaagatgacttttccacactaaagaatgctgacagtcagaatgggaaagacaactctactaccgcaaggcacactttcattattgctgggttctcaatgcaggggtcactttatagatgaaaatggctatcatcttccagcaatttcccacttaaaggatgccaatgatgtaccaatccagtgtgaaatctctcctcttatctctaatgctgaggaaggaatagaaagttatgtggcagatatagaattccatgcacctttaatcatcgatgagaatggagttcatgagctggtgaaaaatggtatatgaacctgataccaagttctaccacaacaggaatagcttttgtttttgatagaccgactgtgaacctacaggacctcctggatgactgaagtttaaatattcacagggttttattttgcttgttgaacccttagagctactgcaaacttcccaagatctagatgactgaacttcagatatcatttttattattcccaactcattgaaggtcttatttatatttttcaattgtgtatttttttccaaggcgaggaaaccattggcaatacaagaaatttcctacagccgaactatagtcaggatgttcaacatcactttacttggagctggaggcatttgtttttgaagttgtgcatagtaataatatgtcattgtagatgttgaaaggtttctatggtaccaaaagtttattttatcaaacattcaactttttaaaggaaataattggacagtaaaataaacatatcttcctgtttctggaaaacaataaaaatttgcttcttcctctcagttttcacttatgcatattattgaacagttgatttcttatgaatagactgaagaaaaaaccatcactattatagataagtaaattttcagtctttttcatcttggatggcaagcaaaatcaaatatatggaggcaagaactattgggcaaagcattttctacctctgtgcacaattgaaatgacattattcaaggtgactgcatctgaacacatcctcaatcatgcattatccaagaagtaaaatggtcttaggcgggcaggggcaggaataatgggaagttataagagtgctggacacagagaaggtacaaagtaaatcgttgtttgctattcactatgtagacattacattgttttttaaatcaccttctgtatattttgttcagccaaaaataattttcagtgataagaagtaggtactttgcgaggcattggggaaacaaaggaaaaacacatcctctgttcttgaggagttcacaatctagaaatgaagtcaaaagagtaaataaatacctgtaataaactctaaaaaacatgtaaaatgaaaaaatatcctgattagcataagagcttaaaacatgactatttcttttgatgaaaaactcttttattaaggagaaaagaccatggtcttactcttatgttgggcgtgtactgagttattaattcatgatttcagattttattcaagactttgtaatagttggctctttgttcctacttgccacacattctgtgttgttttcatattagaataggatggcagatatatctatgttcaaaagtaaatacagtatttgaacttattctattacaggtaaccacatggtggatattggggatattatatttactttgaatgagctacaggaacagtatgaggatgtttgtaagtgagctcttgttgctatgacaagttttgtttataattaaagtctttacattaaatcttaatttataagttttattttataaagggttttgaaaaccttctctgaataatttaccctcttaaatcaaggagataaaatataatactcaaaatgctatttacatgtcctctttttagaaatgtttatgcatattctttgcccagttttttgttgttgttgttgtttgttttttttttttttttttttgaggcggagttttgctcttgttgcccaggctggagtgcagtggtgcgatcttggctcactgcaacctctgcctcctgggctcaagtgattctcctgcctcagcctcccaagtagctgggattacaggcatatgccaccatgcccagctagttttgtatttttagtagagagagggttcaccatgttggtcaggctggtcttgaactcctgacctcaggtgatccacctgcctcagcctcccagagtgctgagattacaagcgtgagccaccgcgtctggctctttgcccagtttttaatggttgtttttttttttttttttttttactgttgtttgaattccttgaattccttataaattctggatattaatcccttctcagatgaatagtttgcaaatattttctcccattcaagatgttgtctcttcaatctgttatttctttggctgtgcagaagctttttagtttaatatagtctcatttgtctatgtttgtttttgttgctggtgcttttgagatcttagtcataaaatctttgcctagaccaatgtcctgtagacttctccctatgttatcatcaaacagttttttagtttcaggtcttatgtttaagtctttaatccagcttgagttgttttttgtatatgatgagagataggggtttagtttcattcttctgcatatggttatccacttttcccagcaccatttattgaagagggtatcctttcctcagtgtatattcttgactgctttgttggctttgttgctttgttgggtgtaaaccaacagttgatcagttgggtgtaaatatgtgactttatttctgggttctttattctgttccattgctctctgtgtccattttttttgagacagagtcacgctctgtcacccaggctggagtgcagtggcgtgatctcagctcactgcaacctctgcgtcctgggttcaagcgattctcctgcctcagcctcttgagtagctgggattacaggcatgcatgaccatgcccggctaatatttgtatttttagtagggatggggtttcaacatattggtcaggctggtcttgaacttctcacctcaggtgatccacctgcctcagcctcccaaagtgctgggattacaggtgtgagcccctgtgcccggcctctgtgtctatttttatacatactgttttggttgctgtattagtcttttctcatgctgctaataaagacatacccgagactgggtaatttataaaggaaagacatttaattgattcacagttccacatggcactttatgtcttttctttggagattttaattcatttacattcaaggtagttattgatatggaaggattttactactgccattttgttaattgttttctgcttgtttcatagatcctttgtttccttatttttctcttcttttgtgactgatttttctctgttgatttttttttacttttttatcttttgtgtatttactgtaggtttttgatttgtggctactctgaagcttacaaaatatcttgtagttatgacaggcaattttaagctgatagcaagttagctttgcttgcataaacaaactatgcttttacctcatctctccttctgcatttataatttttgatgtcacaatttacagatttttatattgtttcccttaacaaatcattgtagcttttattatttttaaccttcatactatgtaagtgaagtgcacaccaccattatagtattagtgtattctgactttgactgtgtacttacttttaccagtgagttttacacatttattttttgtgttactaaacagcatccttttcttttggcttgaagaacactttttgaaatttcatgtaagacaaatataggggatgaactctttcaacttttgtctgggaaagtctttatcttcatttctgaaggacagtttttctaggtacagtattattggttggcagtttatttccttcagtactctgaatatatagtccattctctatggacccataaggtgtctgctgagaaatttgctgtccttattggaacgtatatgttatttacttttgctattttcagaatctccctcttgttcttgatatttaacagtttgattataatatgtcttggtgtagtcttgtttgaattcatctgattrgaggcatttggccttcctgtacctggatatttatatatttgcccaaatttggattgttttctgttcttctttatgtaagttttctactcttttgtctttctcttctccttcataaactcttataacttgactattttctctttggatgctgtcccataaatcctgtaagctttccccattatttttcattctttttattttattcaccgcagactatatattttcaaataacttgttgtcaggttcacagattcattcttgtgcttgatcagttatgttgttgatgttctctattgtattttgcatttctttcattacacttttcagctcttgatttttgtttatttattttcttttgtgtaatttcagtgtctctgtaaaattctgtttttggtcatttattgttttcctgatttcactgaatttttttctctgtatgtcattaattttattccctgaactttctctagacaattagtttgaattctgtcaggaagtttctgtatcttcatttctttggggtcagctatcaggagattattgtgctcttttggtagtattatgtctccttgatttttcatgtttcttgttgccttatgttgatgtctctgcatttgaaggactgggaaagcccttaatcagtgagaatcagagattctgggcaggctgtttggtgtggtccaaaagcctaaatcagaagtgtcaaagattatatttttacctgctcactaacctatttatctgatacatagtgcacttagagatacatatatagcaccatctttaagtattttcagactttaatattaaaatattttcatttaattattttcaattgttaattctcatagagtctaagataagaaacttttttatttcctctaggcaaaatttattcatagttgagattatattgctgctgcrtgacagtctcatagagttgttktgaggatcaaatattataacatttgaaatactttaaaatgtgttattaaaatgtaagataagattctgaaacatcagatamattttgtaaatgaagtctcagtttggggcattgtgttaataattttctaaagatgttgttttatatatgaagttattttttcctccacaaataccaagaatatttaggagagtaattacttaagttctaattttataaataaaatctcccctttcctcatagttctgccttttataagtaaggaatttctatctgtattagcttattaatctattatctttgtcaattgggaaggagtggggaatgagaaccatatacttcattaggctatcattttagttttactgtaactttaaatagctttggatgggaatatgtaaatatattaaagcagcacattacatttgacctagttaatagtccaatcttttgactgtcagttctttaatttttttggtttgttttatatgtttaagaaactgataatttcttgaatagttttcatgaggacttagttgttatttttgaaatgtattgcaaattatacaggtaaatgaaataattgtatatttctcttatttagcaattacagaaggatcacctttgaatgaaattacttcagacagaaagttatcaagtgtagcaggatgctatctaaaatataagaagaaaaatagtttgtcttccaaactccctgaaccttcaatatccaaaaagttaaataaaaaaagcaaccaatattatagcaaaattatggagaatgatgaccttgaatctaaaagaccaaaaaatacttggcaaataagaaaatttctgggtggggttggcagcagtaatgtaggagtccaagaaccatattcaaagaatggcataaactttaaaaaacattcagagaagggtgaaattcatgactcaaagtctaaaccacaaagcttgaagagtagtacaagcctcagtaagtctctggataaaagtgatatttctagtatcccaaaacttcagaagccagctgtaagaaagcattccagtctccaaaaacaggtttcgtctacggaaaaaactgcaattagtactctgggtaagtaaaaatctaggttcttgagttcttcagtcatcacagaaatgaacagaatgaatcaattattagatagttgtaagcatttcaattgttaacaccctgggtaaccaccacttcttttttttttaatttttaaattatttatagagacagggttacccaggctggtctcaaacccctggcctcaagcaatcctcctgcattggcctcccaaagtgctgggattataggcgtgaaccaccatgcctatgcaaaaattctggaaatgtacagtagtgatggtggtacaactttgtaaatgtgattaatgccactgaatagtatgtctattttttattttttgagtcagaatctcactctgtcaaccaggctggagtgtagtggcgtgatcctagctcactgcagcctcgaccttttgtgttcaagtgatcctcccacctcctcagcctctcatgtagctgggagcataggaacatgccaccacacccagctaactttttttttttttcatagagacgggggtcccataatgttcccaaggctggtcttgaactcctggccccaagtagtgctcccgtcttggcctcccaaggatctgcgattacaggcatgagccaccacgtccggcctgccacttctgacacatagactaatggatataatattgtgattttgatgataattcctttccagatgccctctttagggaggagcttaacttttcctgagaaacttattcagtgattaattgcaatcattaatatttcctagaaagtagaaggcctggtttcttttggaaaygtttattttgtaatttattaaacatttaaacaagtaggaaatctgtgtgaaatttttgcttagagtgctgtaatttaaatatataatattcatagtacttcaggtattatctcttatggaaggagaatatcaggaaaaaataatactatatatctagggctccaagtctttatgatttttctcaaagatgagcaatggtttcccaaccaatatattttctctccttgtattactttcatcatagaagcagtgtgtgtggaacccagttaaagatttcttcctgtagtcctctgctgaagttacttaagtcatatttattctcttttaaaaacttactgtcatatcacatttagtatttaatgtaatagataaaatgattgtttagtgaaaattttgtgattcatacattagtgcataattcaaataactcaatggaaaaaaggaatgtgatctattaaggaggcacagtgattatcatcctgattctgattcctttaccaatgcactgctgctactttgtgcctcatttgaatttctgagagttatttttatttcaaaagaattaaaaccttggttaaaggaataatgaaacagcagacagacatgggtagaagaggctgtcagaagaaagtgatatctacctttctcgtgtcactaaaataaaatgatgtcatctaccacagccatacttaatgttctgaatatagagaagtatgaaatagtttatctggcataacttcccaaaacaaattaatggtaattggacttttatggaatatgactgcctgtatgatttacattaaaaaattctaacttytcatttttaaataatttcacattcttaagagtcacaaaaatagtacaaacatttccattaggacatgatctaaaccaggagattaacactgatgcaatactgttactgatctacagaccttattcaaatttgtcagttgttccatgaatgttctttttcaattccaggatctaatccagaatcacccattacatttagttgtcacttttctttagtccccttcagtctgggatgcttcctcaatttttcatgaccttgacactttgaagactattgactagttgtcttgtataatactcttcattttggatttttcttttattccttcacaaataaattcaggttatgcatttttggtcagattacctcagaagtgatattgtacccatctcagtgcatcagtaagaagcacatgacgtctatgtgtatttgcttctaagattttattttttgaaggttatgaactgaaaacatggtagagtaaattaatgggagggtgaagaactctacatttttgcttggaattcttcaatttaaacaaaacacttcggtatttttatttcttggactcattaattttacacacacacatacacatacaaacacacacacacacactyaggctggaatgcagtggtgcgatctcagtgcactgcgacctctgcctcccgggttcaagtgatccttctgcctcagcctcttgagtagctgggactacacacatgcaccatcacacccagctaatttttgtatttttagtagagacagggtttcaccatgttggccaggccggtctcaaactcttgacctccaatgacccacctgccttggcttcccgaagtgccgtgattataggcaggagccaccatacctggccccattaattttattttaatcagaagcaagcagcattggctgggccactggaacagrctgttcccccaaacaagtagattataaatgtttatagaatgttaggacrgttctgtgtttgagctgtaagagaaagattaaatataatgtaatataaacagatatggagagaaaagcagtcttataaaatctataaggtaatataaaatagataaaacttgttctctaatttctaaagattttgagtattattgcttttgacacataaattctgttgcctaatagttctctacattttgtgtatttagaaaacttctgtgaagctatcagtaaacttcaagaaaattacattgcagcagaagaacttcagtctattttgccttcaacaggaattaatttattagatgaagaattccagaagattgtgacagacactagtagaaatggtgagagactgataacactgaagtttctgagaaagttagatatttttatcggatagtattaaatattggaggaattcctctcaattagaaattaggaatgggacagaatgggtcattctaaagaaaattcagatataaaaatggaaaatagtaaaaaaaaattcctttaagttctgaccaaatggrttggtttggagcctttcrtatttccagatcatttcagtaaagctcttcatcactatccctatctgtgcctattaatagtagggtagtgctggggagactgatccagttgtagcraggttcagatggyaagaccacaatatctaaggggtatggatatatctgcacaamtagcccaaggatccaaagattaataattggagattacaaaatacggsggaatttagagccaggtatgcttagcagttaacatttagatgttgagtggcatatcccagtcactagcctaagttaaaggcagagtttaagtttctaggaagggtttttatactagggaagttatttttatcagtaactaagcattttccacaacagaagttcaattgaggagaggaaagaggtgacattttggggaaagactgattggagaataacattagaagtgaatcctcagaatctgggcacaattttttagctaaggcaaatctgaaagaagattcaattaaaaattatataaagagtgggtggcactaaaattattgagccctttttgctgcttatcaggattgacatgatcactctgagggtttatatctaaaaataggtaaaacattggaccacatggatactagggagatagrgatgggratccttggttttatcagggctggttagtattgttaaggtgtcttaatggatagtatattgagtgggttttcaagatggtatgaaatagactccttaactctctcatggtctatctatatggacatctttcttttttcctagatctgttaagaaattagtatctaactcagtcctttgcatgtaatagatattgagaaagcaaggactgtgtctttcttatttttgtattctcggtgcctagcatggttcttggcactaataygctctcaataattgttcaaatgaactgacttaatctagaaagaattatgagacatgatatgaaggagaaataggatgatgaaatgaaggatcaagtamattttaaaaatagttgtgttaaaatgtaaatttgcctttatgcaaaaatacaccagaatgtataatctaaactctttttaaaaacagagaatggaatggtggagttagatgactttgtaaatgctctcgccaaggagcgaagttttcctgaatgcaatggtaggtaggaaatttgttttaaaatgatttagagggaagagcagtgtgttgagaagaattaggttcaacagaactgggcttgcttttggatggatacttaatagtcctgtgactcttaggcaagtcagttgccagtttttaaaaacttgctatatcagagtaataatagctaacttgtttacctcacagagttgtcacgtgaattttgcaaactgaaaagtgagccataaatgtatggtaataatgataatgcggagatcaaataggtaattagcaacattgattaggaattgatgggtgatatggtttgtttttttttttcccatggacttgtttgaatgaaatactggtttggttcacctttgatttagaacttttaaaaacagctttatcaaggtataatttatgtatataaaattcactcatccactgatttttattaaatttattgagttgtagaactattaccacaatacgcttttgttgcttgcaatatttttatacaaatgattaaatattttttagcaagattaaaatgagaaacgaaagatattaaggcttgctgtttttattttgttctgtttatacatatgctaaaaacgaaagataagctttttgtctctttccaaaaaattccccagataaggaaagattagtccaaagcaagattgccttttatacttaaatgaagagacttatgttaaaagctacattatcatttgtcatttctgatggatgtaagtggtgaagtgtctggatttattgaagacaatattagcaagtcgatttcttttaaaaagtgttcctttatgttcagtttgtaagcaaatagactattttattatactttaagttctgggatacatgtgcagaacgtgcaggtttgttacataggtatacacatgctatggtggtttgctgcacccttcaacccatcatctacattaggtatttctcctaatgctatccccctactagccccctaccccctgacaggccccagtgtgtgatgttcccctccctgtgtccatgtgttctcattgttcaactcccacttatgagtgagaacatgtggtgtttggttttctgttcctgcgttagtttgctgaggatgatggtttccagcttcatccatgtccctgcaaaggacaggaactcattctttgttatggctgcatagtagtccatggtgtatatgtgccacattttctttatccagtctatcattgatgggcatttgggttggttccaagtctttgctattgtgaacagcactgcaataaacatacatgtgcatgtgtctttatagtagaatgatttataatcctttgggtatatacccagtaatgggattgttgggtcaaatggtatttctggttctaaatccttgaggaatcgccacacttcttccacaatggttgaattaatttacattcccaccaacagtgtaaaagcgttcctatttctccacatcctcttcagcatctgttgtttcctgactttttaatgatcgccattctaactggcatgagatggtatctcattgtggttttgatttgcatttctctaatgaccagtgatgatgagctttcttttcatctttgttggccgcataaattgcttcttcttttttttttttttttttttgagacaaagtctcactctgtcacctaggctggagtgcagtggcacggtcttggctcactgcaacctttgcctcctgggttcaagtgattttcctgcctcagcctcttgagtagctgggactacaggtacgtaccaccatgcctggctaattttttgtatttttagtagagacaggttttcaccatgtttgccaggatggtcttgatctcctgaccttgtgatctgcccacatcagcctcccaaagttaaatgtcttcttttgagaagcgtctgttcatatccttcacccactttttgatgggtttttttttcttgtaaatttgtttaagtgctttgtagattctgaatatcagccctttgtcaggtggataggttgcaaaaattttctcccattctgtaggtttcctgttcactctgatgatagtttcttttgcgtgcagaagttctttagtttaattagatcccatttgtcaattttggcttttgttgccattgcttttggtgttttagtcataaagtctttgcccatgcctatgtcctgaatggtattgcctaggttttcttctagggtttttatggttttagatcttacatttaagtatttaatccatcttgagttatattttctattaggtgtaaggaagggttccaatttcagttttctgcatatgggtagccagttttcccaacaccatttattaaatagggaatcatttccccattgcttgtttctgtcaggtttgccagagatcagatggttgtagctgtgtggtgctatttgagacctctgttctgttccatgggtctatatatctgttctggtaccagtaccatgctgtttgctgttttgattactgtagccttttagtatagttttaagtcaggtagcgtgatacctctagctttcttctttttgcttaggattgtcttggctatacaggctcttttttggttccatatgaaatttaaagtagttttttaattctgtgaagaaagtcaatggtagcttgatggggatagcactgaatctataaattactttgggcaagatggccattttcatgatattgatcattcctatccatgaacatggaatttttttacatttgtttgtgtcctctcttattttcttgagcagtggtttgcagttctccttgaagaggtccttcacatcccttgtaagttgtattcctaggtattttattctctttgtagcaactgtaaatgggagttcactcatgatttggctctctgcctgcccgttttcgatgtataggaatgcttgtgatttttgcacattgattttgtatcctgagaccttgctgaagttgtttatcagcttaaggagattttgggctgagacgatggggttttctagatatacaatcatgtcatctgcaaacagaggcaattggacttcctctcttcctatgtgaatacgctttatttctttctcttgcctgattgctgtggggagaacttccaatactatgttgaataggagtggtgagagagggcatccttgtcttgtgccggttgtcaaaaggaatccttccagcttttgtccattcagtatgatattggctatgggtttgtcataaatagctcttattattttgatatgtgttccatcaatacctagtttattgagagtttttagcatgaaggggtgcttaattttattgaaggctttttctgcatctattgagataatcatgtggtttttgtcattggttctgtttatgtratgataagctttttgatgtgtggctggattcaatttgccagtattttattgagattttcacatcaatgttcataagaaatattggccccaaattttctttttttgttgtgtttctgcctggttttggtatcagggtgatgctggcctcataaaatgagttagagcggagtccccccttttctgttgtttggaatagtttcagaaggaatgctaccagcccctccttgtacctctggtagaatttaactctgaatccatctggtcctgggctttttttggttggtaggttattaattactgtctcaatttcagaacctgttattggtctattcagggattcgacttcttcctggtttagccttgggagggtgtatgtgtccaggaatttatccatttcttctagattttctagtttatttgtgtagaggtgcttatagtattctctgatggtagtttgtatttctatggggtcagtgctgatatcccctttatcattttttattgtgtctatttgattcttttctcttttcttctttattagtcttgctagcagtctattttgttaatcatttcaaaaaaccagcttccagattcattgattttttgaagtactcttcatgtctctatctctttctgtttttctctgatcttagttatttcttgttttctgatagcatttgaatttgtttgctcttgcttctctagttcttttaattgtgatgttagggtgtcgattttagatctttcctgccttctcctgtgggcatttagtgctataaatttccctctaaacactgctttagctgcatcccagagattctggtacattgtgtctttgttctcattggtttcaagtaacttatttatttctgccttcatttcattatttacccagtagtcattcaggagcaggttgttcagtttccatgtagctgtttggttttgagtgagtttcttaatcctgagttctaatttgattgcactgtggtctgagagactgttgtgatttccattcttttgcatttgctgaggagtattttgcttccaattatgtggtcaattttagaataagtgcgatgtagtgctgagaagagtgcatattctgttgattgggggtggtcaattttagaataagtgcgatgaagtgctgagaagaatgtatattgttggttgggggtggagagttctgtaggtgtctattaggtctgcttaatctagagctgagttcaagtcctgaaaatccttattaattttttgtttccttgagctgtcgactattgatagtggggtgtgaaattctctcactttcattgtgtgggagtctaagtatctttgtacgtctcaaagaacttgttttatgaatcggggtactcctgcattgggtgcatatatatttaggatagttagctcttcttgttgcattaatcccttctttgtcttttttgatctttgttggtttaagggctgttttatcacagactaggattgcaacccccagttttttttttttgtttttttttttttgctttccatttgcttggtgaatagttccccatccctttattttgagcctatgtgtgtctttgcatgtgagatgggtctcctgaatacatttaatttgccagtctgtgtcttttaattggggcatttagccccttcacatttaaggttaatattgttctatgttaatttcatcctgtcatcatgatgctagctggttattttgaacattagttgatgcagtttcttcatagtgtgattggtctttatatacgactgttttttttttttgcagtggctggtattaagaaagtttttcttatattaagaaagtttttccyttcttaatatttagtgcttccttcaggagctcttgcaaggcaggcctggtgttgacaaaatccctcagcgtttgcttgtatgtaaggattttatttctccttcacttataaaacttagtttggctggatatgaaattccagttagaaaattcttttctttaagaatgttgaatattggcccccactctcttttggcttgtaggttttctgcagagagatctgctgttagtctgatgggcttccctttgtaggtaacctgacctctctctctggctgcccttaactttttttttttttattgagaaggagtctcgctctgttgcccaggctggagtgcagtggcacatctccgctcactgcaagctccgcctcctgggttcacgccattctcctgcctcagcctcccacgtagctgggactacaggcgcccaccaccacgcctggccaattttttgtatttttttagtagagatggggtttcaccgtgttagccaggatggtctcgatctcctgacctygtgatccgcccgcctcgggctcccaaagtgctggaattacaggcgtgagccaccacgctcagccaacttttattcctccatttcaaccgtggagagtctgatgattttgtgccttagggttgctcttctcaaggagtatcttagtggtattctctgtatttcctgaatttgaatgttgccctgtcttgctagattggggaagttctcccagataatatcctgaagtgtgttttccaatttggttccattctcccctgtcactttcagggaccctaatcaatcgtaggtttggtcttttcacatagtcccatatttcttggaggcttcgttcattccttttcaatcttttgtctctaatcctgtcttcatgtcttatttcagtaagttgaacttcaatctctgatatcctttcttctgcttgattgattcagctattgatacttgtgtatgcttcatgaagttcttgtgccgtgtttttcagccccatcaggtcatttatgttcttctctaaattggttgttctattagcagttcctgtaaccttttgtcagggttcttagcttctttgcattgggttagaacatgctcctttagctcagaggagtttgttattacccaccttctgaagcctacgtctgtcaaatcatcaaactcattctctgtctagttttgtgcccttgctagagaggagttgcaatcatttggaggagaagaggcattctggtttttggaattttcagcgtttttgtgctggtttgtcctcatctttatggatttacctacctttgatctttggatggtgtttctgtatgggggttccttatgttgatgatgttactgctttctgtttgttactttttcttctaacagtcatgcccgtcttctgcaggtctgctgcagtttgctggaggtccattccagaccttatgtgcctgggtattactagtgtaggctgcagaacagcaaagattgctgttgctccttcttctggaagctttgtcccagaggggcaccaggctgatgccagccagagctctcctgcatgaggtgtctgacaatcgctgttgggaggtctctccccatcaggaggtatggaggtcagggacccagttgaggaggcagtctgtcccttagcagagctcaagcgctgtgctgggagagccctccttgtcaggatctgctgctctcttcagagtcagcaggcaggaacgtttaaagtccgctgaagttgtgcccacagccgccccttcccccagatacgctggtccagtgagatgggagttttatctataaccccttgactggggctggtgcctttctttcagagatgcccttcccagtgaagaggaatctagagaggcagtctggctgcagccactttgccacactgtgttgagctccacccagtccgaacttccaggcctttttagcgctgtcaggggaaaacaagcctcagtaatggcagaygcccttccccacaccaagcttgatcctcctagtttgacttcagactgctgtgctggtagcgagaattttaacccagtggttcttagcttgctgggctccatgggagtgggtcccgctgagcgagaccacttggctccctggcttcagcccctttccaggggagtgaacagctctgtctcgctgggattccaggtgcctctggggtacaaaaaaaaactcctgcagctagcttggtgtcagcccaaacagccgcccagttttatgcttgaaacccagggccctggtggtgtaggcacgcgaaggaatctcctggtctgtggattgcaaaaaccgtggggaaagcatagtatctggcccagatagcacagtctctcaaggcttcccttggctgggggagggagcctctcccaccccctccccgccgccgcctgctccttgcacttcgtgggtgaggcgatgcccaaccctgcttctgctcgccctccatgggctgcacccactgcccaaccagtcccaatgagatgagcagggtacgtcagttggaaatgcagaaatcaccggccttctgtgttggtcttgctgggagctgcagaccggagctgttcctgttcagccatcttgccagcagtctcagtgtttgcatagtttccaaaattccttagttattgatttttagttttattatatcgggatcagaaaagtacttcatatgattttgactttttaaaatttgttgagacttcttttgtggcctgacgtgtggcctatcctggagaatgttcgatgtgctgatgagaataatgtgtatttgcagcagttggatgaaatgttctgcaaatgtcaggttcatttgatctagagtgtagtttaactttgatgtttctttgttgattttctttctggatcatctgtccattactgagaatggtgtgttgaagtcctctactaggattgcattgcagtctctctctccctttaggtctattaatgtttgctttatatatttgggtcctctgttgttgtgtacatacatatttataattgttatatcctcttactggatcagcccctttattattacttggtgaccttctttgtctctacagtctttgatgagatttccttaaarccactattttggattctttatctgagagctcacacattgctgtcttattaaggtcagttactagttctttactctgtccatctgaggaggtcatggttcctagtttgctgttcttccttgtggacatatgtctatatcttgtcattgaaccattaattatttattccagtctttgctgtctagcttgttttggtcttcccagggtatatatgcttagaggatttttgcactttgcctgttgagtcaccttaaccctagatcactgcatctttttgttactagattgtattttaaacccagatttgccttggcttcacaactgttcagagtcctgcatgtctcaaatggggaggtctcaaaagcgatactctagctgtgtgggaaggctgtctataggttcatgctgagtggagccatggcatgtgccttcctacagtgtggtactgctgaacagccactctgatttggtgtctcctttggctgagataaagagcagaattttgtggcctggggttgctggtcccacctctcttttagtttctagctgccctcagggggtttattgcctataggcactcataatacttcctttgggttgattcaggaatggttttcctgtaaaggaacccaagatggtggggaagctggctgactgccatggtctcactttttccactgtagaaatgaagatttcagggggacttttcctcatggtacctggcagtttgggggaggggtgttgtggatatagaagtccttttttcttamcatctgcttggagattttcacttctctgtgcccccaggagtcatttcagcttcagatgtgagttctgggatattactggtgttaatcttggcactggatatttgtttttggttttcagtaggggagaatgaagccagattgcttctgttctgccattttggtgacatcacacttctggtttctaaggttaatttatgtagtatgtatyggtagttcatccccttttaaggctaaataaatctatattatattgtatggatattctttactttgttggtggtccattggctcatggacatttgattatttccagtttggggctgttatgaataatactgaaattaacatttgtatacatgtcttcctctggacatacacttttatttctcttggggagattcctaagagaagaattttagtctatatggtgaatttatgtttaactcttaaactgtcaaaactgttttccaaagtgtttataacattttcatttttcaccaacaatgtatgaggattctagtttcttcacatcttctcaacacttgatttttttttttattataactgttataataggtgtgaaatggtatttcactgtggttttagttttgcatttccttaatgagtaatgatgtcaagcatattttcacatgcttactagccattcataatcttttttttgagactgggtcttgctctgtcatctaggctggagtgcaatggctgaatcattgcacactgcagcctagacctcctgggctcaaataatccttccacctcagcttcccaagtagctgggatcacaggcacatgccactcagcccagctaatttttaaaaataatcttttgtagagatgtggtctccctgtgttgctcaggctggtcttgaactcctggtatcaagcaattccccgcttggcctctgaaaatgctgagatggcaggtgtgagccactgtactcccaagcgtatagctctttatatggacctgcatcaaggaagcattgtgtgagttcaagcaagaaagccccatgacaaactaaacaagattctcaaaggtacagctctttatattcactcagcagccactttacaatcccaagtcttagagggttaggtgagaatagagttcttatcagccacctcatgaatttagaaccatctttccccttgctgactcaatacagtgaccaggcccctcatttcatcttttttttttttttttttaccctatccctctctgacagattatgctaactttgaatctcaagaataatagttggaaactcattctcttcttttacctgggctttttgtataaatggtccaccctttccccagatttctgcattccatgtggtattggatgtatagaagctgagctgatgaaagaaaaatgtttctgttattctacccctacagtggctgcaaatgattttccattttatctcaaatttgcttaaggtgacttgctgtttctacctgtaaaattaaaaaagagcttttaatttttaaatgggaattttgttcacttaaaaatttctttcacaagatagggacatgtatcttgctgtatgtactatttacacatcttctttaaaagaatcatcttttaaataatcattttaagaatcatcaagttcagacatcagtttgatcatcacttgtttgtttagaaagccataatgatttccagtgactacttaaagtttatacctggtaatggctttaatgccctctgctgccyagcttcctactttacctatcctaatcaattagagaaaacctatttaatttgttctagagtttgtgtgtgtatatgtgtgtatgtgtatatattgtgtgtgtttgtatattataaaacttattgagagaggggtagaatatacaaacacaatatacacaaacaatattcacacacaatatacacgcatacacaacctctgtttttttcatacacacacacacacacacactttctctctctctctctgtgttttttcatctttttcttcaagtgatttaaggtgccacctctactttgaagttttctgattaaaccagatgaattccagttagccaaccttcttaagagttcagtatatttgtaagtaatttcctttaagaatgctttaattgcagtaaaaatttatcagtttaaattttgtggagaaaatactgaccaaatttatgaagagtaaattccaagttattataagaagagatgtagaatagttattcctaagtaataatatgtatatttagaaagataaactaaggtgaatttaccaaagactgagccatgtattgccacaaaattatccaagtttatcattttggattgaaaattttctgcttgtatttctgctactgagaagcagagtacaaagaattttaaattgttgaattaaatggagaaattatataatattttgttcctatgtatttcagttatggtactatcagtgcaattaaattggtgcttccttaggttcagagactatagtatagtagaataatatatatgtgtatgtgtgtctgtctgtctatctatctatctgtctatctatctatctatcatatattttttgagatggtcttgctctgttgcctaggttgaagcacagtggtactatcatagctcacctcagccttcatcttctgggctcaagcaattctcctacctcagcctccccagtagctaggaatacaggtgcacaccactatgcccagctaattttttatttttttgtggagacaggggtcttgctttgttgcccaagctgctttcaaatccctggcctcaagtgattcttccgcctggcctctcaaagtgtttgaattacaggtgtgagctactgtgtgtggcctagaataatatatttttgactttgattttgatacttactttttttattaaagattctagatatgcttttagtatataacactgctgaagtgatttatatttttgttaatttagtgttagaactaaaattcatcttgttagtggtgttttatttttgacttatatttaatacttattagcatactcctttatttttagcgttgcctggtgtcattaaagccattgataaaattaaagataaaaatgtggattatgaggatctaaatacttgtcttcaaaattttggtatttacctttctaagccagaatttaagaagatcacagaactgactgaagctggtggtgagtgatatattttcaggcaaactgcattgacacatctggaaggagggtcaatttgttatttttttcttagaaaaatgactaatttttttattataaaaagttaaaattaaactaatacaaaaagtatggaaatactcaaaagtacaagaaaacactcaaaagcctgttatttaggaataaccagtattaatagtctttttaattaaaaaaaaattttatttatttattctttaaataatcttttcaagattttttttcctaggcaaaaatgcagacaaaaagaaagcagaatttgtggtattgctgtctgacaaggtagaagtcaggacaaaaggcattaaattggggcaaatagggattcattattatgtcaaaacctacaattcacaataaagttaaaccatttttgagtatctgtgcccatataacctagcagcagctcttctaaaggaaagggtgagagtggctcgacaggagactggggttataggtgaaataatattgtctatgagttgataattgttgacgctagagatagtatatgaacatattacactattctattttgtgtatatttaacattttccataataaaaagtaaaaaaaggaatatgtctaagttgtatgatacctgtatagagaaaataagactatgtgaagacattaaaatctagataaataagaatgtatcccatgtctgtagattcagagacccaagactgtcaattctctaattaacttatttattcaaagcaattctaataaaaccctgacttttttgtaagctaattctaatatttatatgaatgactaaaggctaagaatagctaaagcactcttgaagaagaacatttgtggagatatgtgtgtgttggggggtgggggttgggaggaacttgctctcctggatatcaaatctccttataaagccgtagtgactaaaagagtgtgagaatggcaaagggatagagaaatttaccaataggacaagataaggaacttccaaacatatccacaaacatacatggcaacatatatgataaagtggtggataactggggaaagaaggaccatttaataaatggtactgaaaaaattacttattcaaatggaaagaatagttagatccctgtctcactccgtattcaataatttccaggtgtgagaactaaggtttagaaaaaacaaagggaagaaaaattttctgacgtaggattttttaagatatgaaataagaaactagaaaagattgataaatttgcatacattaagaacttctctttgttaaaagatacaacaaagagaatgaaatacaagccacacactggttatttgcaacacttacaacagtgatgattatcgtagagaatatataggcaacttttacaaaccaacaactcaacagatattatagaagttttccacatgaagacacaagttgctaataatcacatgaaaaggttctcaacatccttagtaattagggaagtgcaaagtttaggtcataatgagatacttaaaaaaaaaagagggatctgttggcctcaaactcctgggctcaagcaatcctcccacctcatcttcctgagtagccgggactaaaggcacaagccaccatgcctggctcatgacatacatttttatatccactaaaattgggaaaaagtaagaaatatgttattctaagtattggtaaatatggtgaaagtggtaaaaccactttggaaaataatatgtagtatcttgtaacatttgcatatcccatggtttagaaatactattcttagctataaatcctggaaaatctcttggacttaagtaccaggaagcatattcaagaatgtacatggcagcactgatcttaatggcaaaaaaggagaaagaaagcagcatgatattcatccacagaatgtatacataaattgtggtatacaccattgtgtattcatataatggaaaccccatctctcctaaaaatatgaaaattaactgggcatggtgacgtgcctgtaatcccagctgcttgggaggctgaggtgggagaatcgcttgaacctgggaggtggaggttgcagtgagctgagattgcaccgctgcactctagcgtgggtgacagagtgagactctttctcaaaaataaataaataaataaataaataaataaataaataaataaaaataaaaataaataaaagttaaaaatattatgtatgcttgagagggactggaagaattttgacccgttttcttggtgtttttcagcgtttacttctctactgtaarttgatttgcttttcccctttatacccatatatttttattggttagtattacctgatggatataattatatatttctgaatatataacgtattttatataattcaatatttttcataataatacttaaaagatgccaaaaaaatgtgtttctttttcctgtagaaacaaaaaaagtgaattttaaagaattcattgatactatgatgagcaacacggaatgcttctctgaaaaattaggtacgtaagaatatcatgtcttctgctttttgtggaccaaatagtttgacagattttagaagagcgtaaacactcttttagtctcttatagagctagttatcctgcaggtcatccgacaaataaatgcctggcttcctgctgctatatttggctttaatctcctctaatgacccctaattctagaatgtcttctacatgcaagtgaattaaaagctatcataattttatttttcattagcgcacttatagagggctagaaccatgtatagcattcgttttggggaaaagatttaaaatgtctttcaacttaggaaaaatgatgccttctagtgcctgagtactaatatgagaatttctggttacatctgtccccatttctttctatcttccaatgtattcagtaacatttatgaaccattaatatgtactaggctttatgttaagctgtaagtgtggtaatatggaaaagatagttttgccactcagaagttcaccataaagaagtgtaaggtcacatgtgtatatttttaatggagtgaagttagtatgcattctaaaaattggggctgaaagtaacatcgtattattttgttcttacatgttaggtaacagtagattttaagtagcagctctttttaccttacaatataagatttaatttgtctcctatataggggtatatcatacagagaaagagattgtcagttacttcatttttcctaggaaattcacttttatggagtttaaaattttattagcacagagttatatagtatattacctaatctatctctgtcattgtattttatatctcattgttaatattgcatgtttatgtttacttctttttcttttttcttcattagactgctcaaagcatgtcttctttattggttccatatacctcattgggaccttatatccctttacccctccgctttctcctaatccatcagtctcctcctgttttcacttttcttccttatttagtttaaattatcttatctatatatacctaataccctagactgtcttgcctccgtgtacttttgttgcacctatctggcaaaactctcaaccccgaatgaacccaattaccttccttcttgtgtctgacagcatttctggagaagatcacacagctgagaagattgtacaggttataaacaaaatcttggtcactaatatctgctggctcttcctaactgtctaatcttcctgagaatccattctctatatagcagcacagtgactttttacaaatttgtagtaagataattgcactcctttgtttaagatgctccaggattttgcattgaaatagtcttctttttgttgtctacagtggtagattgaagaggaagtaggagccagaggagaattttagggagagatatagaacaaaagctacttaattgtattatcaattgaaaatgtttctgaattcacacttttaaaaatctaacttcaataaaaattattatttataatgtttattcagggttggggcactgtaagttcttaaaatatttcaagatcctcaaaaatacattatattttaggctaaatattttattatgttttcatttttgaaagttggcaattcatttatgctatatttattattcttttaaaccataraaaccttaatttttgtctattccagatgacagtttactgtattaacttcttgcataagcattcgtaaaacttgtgttttatctaccctttagtattgcctgatgctattgaaaccctcgacgatctcagaaaggagacgatgagtgtttctgacctgtggaatactctgtctagtttgaatagtaatttaaaaaaggatgaatttctagctgcattggaactagtgacagttgatggtgagtgttacaaatactaaaattaaaaagtataccaagatattactttattttctgtcaactcttgtcattgtatcttgtacttggcgagacggagtgttcgaatatgattgaaatgccaacatatgcatttaggaaatattgtataaagaaagttcagattgtttggctattcaatataaaaatattattatgtaatttattattgctctaaattgatcaaatatgcattgagtaccttcaagttgtgtggtatgttactggaaaatggcatatcccaatgaacacagagggcatgattaggaaatgttaagagatctattcaaattttataataacagtacttggaatattcatactgttttgttgaaataggcttttatttaatttggtagaaaaacacacctgctgatagctaccacctctatttagcaagttaaaaaaaaaagcaaacaaaataaaaacaaagttcaaaaaagtattgtataacaaagactatagactaaaaaatgtaaagtaagtctccatcatttactgctcatattctacatgcaggaaggagagtacccagcctacaggtagacatttctactctctcatagtcttagtgcctagaagttaaaaatgtacctagtacgtttatattcttttatgtggaatgtttatacagaactagattagtaacacgagcatgctgtcaggggtctttgtcaaagaactgtctttttctgtaatcatttattatccttttcatccattaagcttccatttagttgaggctagaagttttgggctttaaatgtattgattattttattggaagatttgaggtgaaaagggttgatgaaaaatagaaggctaatttctacccaataatatagattttcttccctttttctctgtggcagtgcttcaggttcttttgttaaagttaatggaatttataggcaacatgtaccacagaaagtaatagatagcatttatttgaaccagaccaacaaagtattattttatgagatatgaaaataacgtccctctccctctccccctccccctccccctccccctttccctctcatgccgagccgaagctggactgtactgctgccatctcggctcactgcaacctccttgcctgattctcctgcctcagcctgccaagtgcctgcaattgcaggcgcgcgccgccacgcctgactggttttcgtatttttttggtggagacggggtttcgctgtgttggccgggctggtctccagctcctagccgcgagtgatccgccagcctcggcctcccggggtgccgggattgcagacggagtctggttcactcagtgctcaatggtgcccaggctggagtgcagtggcatgatctcggctcgctacaacctccacctcccagccgcctgccttggcctcccaaagtgccgagattgcagcctctgcccggccgccaccccgtctgggaagtgaggagcgtctctgcctggccgcccatcgtctgggacgtgaggagcccctctgcctggctgctcagtctggaaagtgaggagcatctctgcccggccgccatcccatctaggaagtgaggagcgcctcttcccggccgccatcctatctaggaagtgaggagcgtctctgcccggccgcccatmgtctgagatgtggggagagcctctaccccgccgccccgcctgggatgtgaggagcgcctctacccggccgcgaccccatctgggaggtgaggagcgtctctgcccggccgccccgtctgagaagtgaggagaccctccgcctggcaaccgcccgtctgagaagtgaggagcccctccgcccggcagctgccccgtctgagaagtgaagagcccctccacccggcagtcaccccgtctgggaagtgaggagcgtctccacccagcagccaccccatccgggagggaggtgggggtcagcccccgctaggccagccgccccgtccgggagggaggtgggggggtcagccccccgcccggccagccgccccgtccgggagggaggtggggggatcagcccctgcccggccagccgctccgtccgggagggaggttggggggtcagcccgccgcccggccagccgccccgtccgggagggaggtgggggggtcagcccccccctggccagccaccccgtctgggaggtgaggggcgcctctgcccagccgcccctactgggaagtgaggagcccctctgcccggccagccgccccgtccgggagggaggtgggggggtcagccccccgcccggccagccaccccgcccgggaggtgaggggcgcctctgcccggccgcccctactgggaagtgaggagcccctctgcccggccaccaccccgtctgggaggtgtacccaacagctcattgagaacgggccatgatgacaatggcggttttgtggaatagaaaggggggaaaggtggggaaaagattgagaaatcggatggttgccgtgtctgtgtagaaagaggtagacatgggagacttttcattttgttctgtactaagaaaaattcttatcctgttgatctgtgaccttacccccaaccctgtgctctctgaatcatgtgctgtgtccactcagggttaaatggattaagggcggtgcaagatgtgctttgttaaacagatgcttgaaggcagcatgctccttaagagtcatcaccactccctaatctcaagtacccagggacacaaacactgcggaaggccgcagtgtcctctgcctaggaaaaccagagacctttgttcacttgtttatctgctgaccttgcctccactattgtcctatgaccgtgccaaatccccctctgcgagaaacacccaagaataatcaataaaaataaataaataaataaataaaataactagaaaagtattttttatgataataaaaactcatatattgtgtttattattctttctttggaggggacaaggtcttgctttgtcacccaggctggagtgcagtggcgcaatctcggctcactgcaacctctgcctcccggttcaagcgattctgctgcctcagcctcccaagtagctgggactacaggtgcacagcactgtgcctggctaattttttgtagagacggggttttgtcatgttgtccaggctggtctcaaactcctgagttcaggtgatcttctggccttggcctccctaagtgctgggattacaggcatgagctaccgcaccaggcctgtgtttattattctgtacttatgaagcaaaagacagtatataaaatgcagattttacaatttaagcctaaatatacacatgatattgaaaactgtatctgtacgccatttgtcatatcatttcttcttttaacattgtgcacttagtacaaaggtatttagttcttattttaatgcagtggtttgcaaaattttgagatttgttatttttgtttatatttgatattgttaaagcagaatgctttttttccaaattaaatcttatacagtatcctaatatataaaatattaaagttgagcttctctgaccaaagtgggagaaatgaccaagtgaactgctgaaacagctccataagaccttagaaatataagaaagaacttaaaattactgatctagggtattattttgaccaggttatgttaaaaagaaaaaaaaccctgaaaaacaactgattcagattctctctagtgaaattgaagagtgagttcttggttattggtggtattccatgttgactccttaatattttaaaatatatttaaaattaaaaaataattttatgatgattacaaaaaaagcattgaaaaatagaaaaggtaatttatcatttggcatattcagaaatacttcccaaatatctagtcatgtagcttatgagctctcttgtttcttctgaaagacctgagtgaagaaagttggtgttgagcaaaaatgtgtaagagggtatggaaaatggtcaaggtgaatgtgagacattgaatccataggcgaagaattagaggaaatcattaataggtgttgttaggcatttaaggcctgggacaatctcttctctgctggtggtttctctagctttatttgttttagatttttaaacttaaactgatattctctgtttctcctgactctgatatctgatgtgtttgaaattagcttaataactttgttttcttttcggcttggcagcaagactctgaacttatcttcatgaytttttatgcaatatccattgaagccagatctgaatctttgtttcaggctctaactttgcaacctggcatcagctgtgattaatcctgttttggtggtttagcaaagaataattgagctacaaattcttgacagcagctctatccatccacatttcttttcacaggatttatttaaagatatccaggaaatctttcctaatattggtagttgctattctatttcagcaagttgtatgaacctaaggatcaaatgagatcacaggtcatgcttacagatttgggtcccttggtaaacaggtccaaagctagctgtagattttgttagtgttatcagtacctgttgacgtcagatggctccctgcttcctttcttcctttgcctccttgcctccttgcctctctccctcccttcccttcccttcccactctccctccctcctttgcttccctcccttctcctcccctccccttccctctccttcccttcccttcccttcccttccttccagaattgtaagtagctgtgatttagttctacttgattatacataccaagaactagattcagaggggactccatttaggtgactgaattacagtacccgttgcctactttaagctgagctttaagctactgtaaattgaagacacttaattaagagcgtctttatataacatggtcttagaatatttgattatgtaaccttgttgactgatgtgaagctagtggaaggccatcctgagtattataaaagtataaaagaagcatgaggaatggaatgtacaaacacttctatccttctctaccgtttctcccatcagagagagaacacagattcagggacagagcctttacagttagtgatatataggactctactaaatgacagaagcagcaaaaatactgcaaaaagacatgcgtttttactctagagaatagttcctaaaagttcaagtgtcaatttaaagctaaggtagatagaaggtgagacattgttaattgtagctatatacttaagccctgttcaggcttttatctgctggtgacacattttgcttgttgtgctttgttctagtctatgataataaactataatatttctaaatcctaagcttccttattcctggctgggaaaacaaagctgcttctgtttcctgtgttcatcactttaactttgtaatctagtacttgtgtactgtgtaagaaatgggtgtaaacacatatcagaaattgtagtcataggcctatcaggcactgaaagacgtctttaaagttttctggtgtagaatttttatcttcaaacaattgaaagacaaaactaagactgaggtatgtctcttaattttgtctaggaatatgtcttggttttatattttgggaatatggattatattgtttccattgattgattgaaattgagaactcagcctgacttttttttttttttttttttttgagatggcgtctcgctttgtcgcccaggctggagtgcagtggtgagatcttggctcacagcaacctccacctccccagttcaaacaattctgctgcctcagcctcccgagtagctgggactacaggcgcatgccaccacacccggctaatttttgtattttttagtagagatggggtttcaccatattggtcaggatggtcttgaactcctgacctcatggtccacccacctcagcctcccaaagtgctgggattacaggcgtgagccaccacgcccagccatcagcctgacttctatagtcttaatatttattaatcccataaaattaatcctttggttattcaaaaatatgaaaaggaaatatgattcttaggagtgcatcaaatggtttacatttttataggttgctttattggmtctgacttttgcgtaatgaggttggtctattaaaagtgttttttctcacagaaggtgacaaagtacaatttgaagaatttgcaaaagtagtaaggaatatgcgtgatgctgccaggttagaaggtaagtactgaattatttataacggttagatttacttttattgaaaggacttgcttttgtttttgtttttaatgctgtgtgttcacctaatttctggttaacatgttggcattgatatgtttatacgcagatgaaasttggttttgattaaacattggctggcatataggaacttggctttcagaatgtatccttcattactaactgataaagctggtttactctgtctagactatttgttaaagaacttggaggagccaagagaataggcatagtatgaagttctatgccttctttcagtatctacacatgtaattttaagggaatatggtcagtgtctgaccttgmaatttaagattttagaggtggaatagacaattctaggtaatgataaggattaagggtagccattggtgtggatgactttggaaaggaaataaaggccttttgaagttaagaggtcaaagtgctctgaggccaggctcatccttattatcattggatgatattgggatgagaggtagaaggaggattatgatcaaagtgccaaaatcctcagagaatgtgaaggagtgatcagacagtaatcaatactgttgtcaggagagtggcatagttgaataacaggcctgagcctcatgggagagggataaggtttgattgaaggtggaactaaaatggcctgatagcagcagcagaaagacaggaaaatgctattctgcttcctggtcttacagtatgtggagcatgggaggatgagcagactctactcaaggtggttgtgcaaagaaactgtttttgaaggaaatcaagtgctaaggcaagaaagcagagctgatacaggttttctgggtgtcagcaaagctcagattgccatctgtagttgcatcccagtgatgttagaggaatagaaagtgaggcaggacataagacttaaactgtgattactatttgcagctagtttctgttgactttaataataataataaaactaattttattctataaatatgacatttattgaggcattatatgtctaatrctatcttaagtactttttatacattgttatatttactctccacatcaaccttgtgaggcagatagtattatcccattttagacgagacattaagtagtaataatttgctcacagttgcacagttccaggttacaaatcctggagccagactttgaatgctggtctgacttaaccagtgctggaaataaagcaacattccagacactagggtacaattgggtcctggtggaactgaaaaggaaaactgaatgagcccttgtaaatcttgtctcatattttacgtttttcataattctgaaagttattttgcctatatctgatgagttaattttatttgatatcattagaggtccacagcaaaataattactttgtataattgcagtgaaaaattcagctatatgagtgattttggttgtgcaaattttataaacgcaccagagaaacgtgatagatcaagagaactctttgcacattgtgctgctggccatagaattctatgaggggagaatttctctctgagatttcttattcctcagttcaggatacaataataaactatggatttccactaacaaatgtcttgagtgatggctactgctttttattaattaactttttttctatttatagagttacaggaagttgtcttagctgctgatttgctggaaggtgacatgatagctgggaagaacttggaagactttctaagaaatgttgggattaagtcacctaaagaagaggtagagaaaattcttcaatcagattttgtttctggtaagcattttaaatattactctcaggttttttttttgtaggagtaaagaagatgtgcaaggtctataggtatttgcttatgttactataaatgtaatctttgaaacggagcctttcctcttaatttcctcttttgcagttatgagaatacttctatacaagcgggtctagattttgtggaagtgggcttgttagaatgctctgtcctcattgctatcttgatttagcgaatgaaaaacatcttaggaattcaagttctgtgaatagaaatcctagctttgccacctttgaccaaattactggtcagagttactggggctttctttgtacttcagttcccattataggtagaatcagaacttagtatacctacaacattgtagggttattgcgaggcttaatggatgaaaatgaatctaaaagtaccttgtaaataaaatgttcgagaaatatataagtcatatgctgattttgatactagcctttaagtattactttgtctaggggttcttgtttgtcatctctctcttttccttgcagaagataacatggtgaacattaaagactgtatgagggctttgagggacacccagaaattttccaattatattggtaagagctttatggtaatactgttagaaggcaatgatacagaacttattcaaagttcacctagtaaaaccctaaatttggtgtttaaatcttctttatagtatctgtgccaaatgtttgcttcatgtgtacttgaacactttcagttatggggaacttcctacattttattttgaaatttaagaattgtacatttgtgattggagatgggaaaaataacaagagtatgatcttttccaatagttaaaataagacatctttattatatgaatgaatagttctttttaatgctgtaaaaaacttaaatgaccaggaatgtaagaagtataaagtgcaagtctcttgtaacattaatgttacccttcagaaatatccctatgaagctttggtaaatatccttttaggctttcttctttacatctgtccataatattgcacaacttgagtgcaatatatgacagtatatcttagatataattctgtgttccactatattatgtaaacctacctcattcttttaaaagactgcataatgttatactagaggaatgaactataattttgtccacaatacttttaataaatatttaggttattgccatttttttactattacaaacatttggtgagtatccttgtacatatatctttgtgcacgttgcacacaatttttctgtagggcaaattccttagaagtggacttgctgggccaaagtatttttagatgtaaaatgttaacaagctactgcctaattaccctcctaaagatttgtggaaattcacacttttatcaacagggggtattatttatttaaaattctgataggagcattaatactttgtcttacccatttcacatttttttctagtttatttttgattttttgactttgatggattgctttttgccatcttttgtttcattttgtcagtttggtaatttgattcttccaggaaattttaaattgtattgaggttaaaatgacttagactattaggacagccctatgcacttctaattcttttcatttttttgtatatatggttatttctcattcttaaatttatatatataggtatatatataacttttttctttgctactgaatgttctattatctctgtttttaaagtactagctcttgggtttatctttagcgtttctatttatagtttaaaaattaatttctgattttacctttagtaagtcctttatattgttcccttatrctcatttaatagtttttctaatttcttgtttaaattatttatttactttattttttttcttactgggtaataaacatgtttaaggcagtcaattttcattttagtgaaactttggtgtatctaacagtctttgacttgttaggctattattatggttattttataaatatttccagttgcattttgattttctccttggtctgagagttatttaggaggaaactttaaatttcaaagcaatttatttatttatttaatttatttattgagacggagtctcattctgtcgcctcggctggagtgcagtggagcaatcttggctcactgcaacctctgcctcccggtttcaagcgattctcctgcctcagcctcttgagtagctgggattcaggtgcacaccaccatgcctggctaatttttgtatttttagtagagacagtgtttcaccatgttggtcatgctggtctcgaactcctgccttgtgatctgcccgcctcggcctcccaaagtgctgggattacaggcatgaaccacgcccggccaaatttcaaagcaatttaaatgtcattgttgccttaagtttgttttttatatctagttgtattttattgtggtcagagaatgaggtctgtaatagacggtttgatagttccctagttcattagagacagaattccctcaacttttatatttactatttaacaatcaaaataaaattagttggttgcagggatacgctaggtaaggtacattcactcatttcactctttgtcttggaagtccttatgactttttgaagtagctcattctataattttcgacagctatagaactagaacattattccacatatttggtggaaatttcctggaaccatatttracatttggactcttcctcccattaatagccttccagaaatgtcaagataactcacatgttctctttccttcccactaaatgaatcttctctctagactcaaatatcccttcaactcttcttcactgacctgtttttgaaacttcttaccaatgacaaatgactatatcatagaacaaaatcctgagagatgcctttttaggaatatactttggaaatgtgaacttttaacatttttttaaatcaagggaggtcagccatggtcttcttagtccaaatgtttgtgactgtgctaaacataagaggctgtgatgattctctaaaatgggtgaagttagctgacaggaacaagggatgcagggaaggaaagagaaaaattggcatttaggaggagttatgaggaatgaaggggactttactgaaatggtgcgcttattaacagaataactagggaaactttagcatacttttgtctgtagcagaatagctcacctcaaacccagacatttaacaaatcaattttaagaataaagaaaagggttatttttaactattagagctacaaatagaaagctattggagtggagaaaactattgaagtagagttatagaaaattatcagagtggagaatggaccactctaaatatttaaatggccacatgtgactggtgactgccttattcgacagtgtagatctcaaagaggccatcaattttattgttatgctcaaaagacttagatccatggactgaattacatgttgtatgtatattctctgtttgtagcattgaatgagactatcaatacattggactccacgaaagaaaattgtcagtttgacaaagacaaaaatccagatgtacttgaaaacactgataggctttcttttactgatgacatacttcaagaagtaatggatgactcctttgttgaagatgagttgatttgacagacaaccagcagcttgtataaaaaatttcttctgaattttatttagttttttgttttttgtttgttttttgttttttaatttagggaggtcagccatgggctttctggtccaaatgtttgatattactgttcttctaaatttttatccaaggatttcaaactattttaccaagtattatttaagtcttaatacttggcccctaaatcacaccataaacttgttggacactttactgtagaccatattcaggtctatgtgttatatgtgcccacagagatttagtcattacagtatcaaatttctgggtgatctgatgacctggattgtaaaattgatctcagagtatttatatatttgtggcatggctttgaagaataattttatttcaaagttaatccttttccttttatgtgttttagagaggtcttaatggttttgtagctttctgtttttggatgaaaggccctttgagaagtgcaaggtattgttgaaaaattaatgtttatttctatagccagttgtaagtgtcgagttgttgtttactttatttacaaagaatttacctgatccatctatatagcctcagcttggatgtactgagatagagtttaccccatatttagaaagccatttcctgcctttaaatttagcttcagctgaaaaatgtaatcaggctgggggaagtggctcatacctatactcttagcactttgggaggccaaggcgggcagatcacctgaggtcaggagtttgagagcaatctgaccaacatggtgaaatcccgtctctactaaaaaaatacaaaaattagcctggcatggtggcccatgcctgtagttgcagctacttgggaggctgaggcacgagaatgcttgaacccagggggcagaggttacagtgagccaagatcacgtcattgcactccagtcggggcracagarcaagactccatctcaartaaataaataaatacaaaataaaaagtataatcaaatcccccattgccccccacctcacaccagagaatatttggcaatatctagagacagtgttggttatcacaactgatgggagaggactactggcatctagtgaatagaggcaagggttgctgctaaacatcctacaatttacaggataatacccttgccccccccaataattatctggccaaaaatattaatagtgcctaggttcagcaatcctgtttagagttatcatgtaaaattgcccaaacctattattttgaaagtactttttataggttatttgttttgtttatcctgcttaaaacaaaaatacaaattaaggcaaatataatttatgtgtattctaacctctgtttgtttcagggtaatacctgggctagctgtgagttattctaaactgttctttaatacaatagagtccatctatgcaaatggacagattttatttctatcgtttgttcctcagatctctacaccaacttgcatctctgtaggaagtatgtggagtgaatgggtataatgtaatacccattcattaattacatttaattaagtaatgggtataatgttcttaggaaaaattctgggactagatagtakataggtaggtaagagatcaagaaggacaatttagactaataattaaggattttattgaatagaccggctggggattaacttctccccttagggagaaaggaagcatctgtgacattagaaactgccacatttaaggagttggtggaagataaccatgaaggagcccaagtagtaagcaaagagtgaggagagaatggatattttgggagccagggaacaacttttgagaagaagggaatggttatcaatgataaatgttagtgggaaaagaagtattcaatctatccattggtttcctttcaaacagggtaagatcaggatgccattcctcattgtgtaatgtctctctctaaatttgcagatttcaggaaagaggcttcaaatctaaaattaccaaaggtaaacggtgagtaagaactttgtatatgagaaaattttcaataataagagatattttttagaataattgccaagtaccaatgtatttctcatttttcctgctgacttcagccagattactatttttccacaatagtaatctgatcatgttacctccccctatttataactcttcaaacatttcctgttattaggataaaaattaaaatcctccatgccctatctttctagcgttattttgtaccattatccttgctttctgtacttcaactaaattggctttactttagttccttagatactcccctttcctcccactacaagacttttgcatattctattccctggaatattcttccctgatcctctttgcctactgttgtartctgttttgtgttgctgtaacagaataccacagactggataatttgtataaaaaaaaaaaagagattcatttcttacaattctagaggctgggaaatccaaggtcaagaggcccacatctagtgagggccttattgctgtgtcatactatggcagaaggcagaagggcaagaaagtttgagagagcaagagagcaagaggagactgaacttactttcataataagcccactcttgcaataactaaatcactgacattaatctattcatgagggcagagcctttgtgacttaatcacctcttattaggcctgacctgtcaacactgttgcattggggattaagttttcagcacataaactttgggggacacaatcaaaccatagcattccatccctggccctcaaaattcatgcccttttcatgtacaaaatacattcattccatcttggtagccccaaaactcttaacttgttcccgtgccaactcaaaagtccaaattccagagtctcatcttaatcagatgggtgagactcaaggtacaattcttcttgaggcaaattctcctccagcagtaagtctgtgaagttagcaagttacatgcttccaaaacacacaggcataggatagacatatccattccaagagggagaaatgagtgagaagaaagggataattggtcccaagtaagtccgaaaccaaaaagggaaaacaacattaagtctgaaagctggagaataatctcttttgactccatgagtcaattatagaaaagcctatcatcagtggctagtataggtcagaattttttgtttcctttgttatatgctgttattaaattctgtccatttcatagcacttatttcatattataaatatccgtttctgttttcgattatttgattaatatctcttcctcccacttgcctggtatcattgggccaaggaatatgtctcctctttgctttccattgtatctccaggacctagcagagtcctggctctttaattagactcttaaggttaactaatattaacatctgatacttatgtaatatttactatgctattgttccaaatcttttgttgttaactcataatcatgaatattttttgaatgaatgactgaatagatttgtcttcttatctcttcagactcaccgtttatcatttctgcatttgtatttattctgtagtcatactacttagcacaatttaaattggctctatttgcttttgcatttatttgcatatactgtttcctttggatacattccctgacagacaaactgacatttcccccccaaactcagttcaaatgtcatttctgatgccataagacttccttcccagagttcatcactttttaaatctaggttaggtgaaccttctcagtgcttccataattttgtgtgtgtatttttctcatatcacttactatatgatatattataattttgtttatagatatgacagatttagtctcccttatcaaggaatttacttgaaactctttgatacgagggactgaatattttattgttgatcttagaagctgtaaaataactgttagtagaatgaatgtaggtctaagatgatattatggtgttctttccaagtgatctccatgaaggcttagatctcctggtgtaatgcaacaattttcagcatatggaaacatagacaacttcatgtggaggttgagggagaaattgattgagaaatggtacagatgaaaaattaggctgggtttggtgtctgatgcctgtaatctcagcactttgggaggctgacgccggtggatcacttgagctcaggagttcgagaccagtctggccaacatggcgaaaccccgtctctactaaaaatatttaaaaaattagccatgtatggtggcacatgcctgtaatcccagctacttgggaggctgaggcaggagaatggcatgaaccaggaagcagagtttgcagtgagctgagatggcaccactgcactccagcctgggtgacagagtgagactccatctcaaaaacaaaaacaaacagacaaaaaccagaaaaattaaaaagcacataatgattatgttttatattttaaattggtgtgagatcaacaggactgccccgtttggttatgtgagttgtgctttgcacaaaggtgcctgttgagagagcataagtggaggctgaaatgcagttcatactccaagccttgaacctctgtgctggattgcagttgcctagtgaaaggtacccttttttgtaactaatgcatagagaggaggtgccttttcccaattcacacaaaagcacagtatgaactatctgaggccctggggatcaagagcttcaatctcaaattttagcctttgtttacatcatcaggtggtagaaatctttagatctacatgtacagggaggcatgtagctcattcagtttttaatggatgaatgaatgaagacaaagtcttattataatacatgtcaatagcccatcatattattctctttgccataatgttttttagtttcaagtgctgcttgagggaagtgggccatcagttacaaatagaaaatattgtgtttcctttggagagattttgattcagataaatatttaatttgaggtttacctatggtagattttggacaaattattttgaatgttttttacaccataatagcttgtgtacatttatctttgtagagattaaagaagctgctaacatcttgtcacatgtcgataatggcaagattggtatacctgatttggagcatgccttgaaatgtttgaatgttaatttaactgaggaggacttyaatgaagcccttaactgttgtaacgtcagtggtgagcatttttttggcctgagattcttttcattttttttctacttatgaaaaatagtcttagagtgtacctataaggataagatgctaatgggagtcatttttcttttggaggcttaggttgatacaaattagagccaaaccactctactaatttaaatatttattgaacatatctattcatactcatatggatactatatgtgcttatttaattaccattcattacttataagcatgggtggaaaaataccataaattgtataataaaaacatgacaacagcagcttattttgatatgcaatctttttcagaggagatctgctttcattttttttttacagtacttgctccattttgatttttaaccaaataaaatgtgggagggctcactacatttaaaaataagttatttagttttagtgattgttttcaagtagtccatatttacctttgttttctgtctttgacttcatgtaatatgtacttgatctcctttcctatacacatttacttttaggaagtcaaatcatttgagagtacttctagaagctgctgagttctgttggtttttggcgaacttttattttgggcttatcttaaccaatttgtgtctgggaatcctgtgagtcctaggtttaagaatacctctccagtacagtttagttattgattttgccaggttccccagattgttattcacctagatcaatttttatgttttgatctcagttttctcacatcatcagagtggtataaatttagacttcacacccacatgagatgcatgctgggccttcaatttctcacaagagattttttttttccactgtctttcagaattgggaagatttaggcctccttgtttatttgagtcaataaatatagtattttaatttcttttttaaaaaaccaggattgaaaccctttaagcatttcagttttatttgatatctaagttcctaaccttatttttatgggctcgaatctttttttctgactctgtatgaacatttaaatcaagcacctagccatttctgggtctcatctctatcccaaagatagttttggtgttagtactcaatgcttagcattctggacctcagttcccagttaactttttgttatttccttcatatgactcagtcacacatccatggaatgttatatgtcatagagcatctctaggggtttgtagtgggatggtttctgtgctacccaggtctgccattttgtttaaactcaaagtctccttaatataattatagccctagattgtctgctgtgtcacattattgcaccttacttcacttgtgactgtgtakgtgtgtgtgtgcacgtgcgtgtgtgtgtgtgtacatgtacatgtgcatgtatgtgtgtattctaataacattgtctcctctggccttagactgcatcaattaaaatacaacctcttaacatttcctgactttgtgacctggacaagttatttaatttccatttgctttcatctttcaaaaataggcatgcagaacctgggaggcggagcttgcagtgagcagagattgcgccactgcactccagcctgggcaacagagcgagactccatctcaaaaaaaaaaaaaaaaataggcatgcgaagagtatgcacatcacagaattattatgacgattacatgatttaatatatgtaaaacaccataaaagggttcctagtatatataaggaactcaaaaatgttagctattgtttgctagtaatattattaactattcactgggtggttttaaaaagtgttaaaagttctattgaaatagtttcaatcatttgagacagaaaagtgagctagagtgaaattttagctaactattgtaaatcggtctttatttcatgtgccaattcagtatcaggtttttaatgtcagcattttttactttgaccttccagataatatggaggtggatttaaaagatttcttaatgaaaatgaaagaaagtccacatttccaaaagtccaagggtaagtgaatacttcttgttcaagagaatggctagaaaataaatatttaaaaatgacatttaaaaatgaaaggtccaacagtgatagactggattaagaaaatgtggcacatagacaccatggaatactatgcagccataaaaaatgatgagttcatgtcctttgtagggacatggatgaaattggaaattatcattctcagtaaactatcacaagaacaaaaaaccaaacaccgcatattctcactcataggtgggaattgaacaatgagaacacatggacacaggaaggggaacatcacactctggggactgttatggggtggggggacaggggagggatagctttaggagatatacctaatgctaaatgacgagttaatgggtgcagcacaccagcatggcacatgtatacatatgtaactaacctgcacattgtgcacatgtaccctaaaacttaaagtataataataataaaaaaaagactatctggatttcaggtttttaatttttagtctctctaattttaaaaaggatttcaagccacttatgatgtatagtataaataatataatataaaaataagtgaagaaaattgggcaaagatataatgagggggaaaacaaggtaaggttaaaaagattaatatgtgcaaggtcctttctcaaaggtagttaggtttttcttcaatgacttgtggatctatgaattaaatcatgtgtggaattggatgagggaccaccagtttttgtgacatcttaagtcatgcctctggagttttcagatgttcacaactggactgcccatctatttcagttatagaaatcctaacttcagttaatcagtccttctaaatcctcgcagtatcaatccctgtattattcttaataccacactatctatgttgcctaaccacatcattttgtccctgctatttaaagacttctgcttggcctctgtccctgaggttcgtcttattctttttgaaattagggagaccatttcaacaccaacatattttcctgactcccacatctgcagagaacacctaccaaagaactcttcatggatgcagatacccttatcaatggcgtatttctaaatgctttggtgaaacaaatgtctttgtatcacattttttacattttaatatctctaaaattggatgccttatagtatttttaatcagatgtagcttttagaattgagacataattaatataccataaatttcacccttttaaagtgtaccattcagtgatttttagtatattcagaaagttgtgcaaccatcacaactttctaattccaaaacattttcatgactccgaaagaaactctgtacctgttagcagttattctccattcccacctctctccagctactgacaaccatgaatctactttctgtctgtatgaatttgcctattttgaacatttcatatagatgtaatcatattgtatttttttgtgtctaacttcttttatacagcatatgctttctttctctttttttcaacttttattttagattcagggggtacatgtgcaggcttgttacctgggcatattgtgtgatgctaaggtttgggatatgaatgatcccatcacccaggtactgaggatagtatgcaatagttagttttacaaccctttccccttctccccctcccctcctctggtagtccccactttcaattgttgccatctttctgttcatgagtacccagtgtttagctcacacttataagtgagagcatgcagtatttggttttctgtttctgtgttaatgcacttaggataatggcctccagctgcatccatgctgatagcatgtgttttcaaagttcatttatattatagcatgaattagtacaattgactcttgaacaatgtgggggttaggggcaccttctagataatatggagttggatttaaaagattgcttaatgaaaacgaaagaaagtccacatttccaaaagtccaagggtaagtggatacttttgcttcaagagactggctggaaaacgagtggctacactgtcaaaaattcatgtataatttcagactcccccgaaacttcattactaatagtctactgttgagtggaagccttatcaataacataaatgattgattaacacatatctttacggcatatttatataatactgtttcttacaataacacagctagagaaaagaaaatattgttaataaaatcataagggagatagaatatgttgactcttcattaagtgtaagtggatcatcatcctcatcctcaccatcttcaagttgagtaggaagaggagttggtttgctatctcaggagtgggagagatggaagaggtggaggcggtggaagaggaggcagaagaggcaaggacacttggtttaactttatggaaatacatcataatttcttgtctgacgttattggcttttcatttctctaagaatgtttctctatgataccaatctttcactgtttgctttagtttcagtgtccatatcattgaagggtccatgtcataatataagtcaaagcagtcatgaataattggaactcttctacccgattgtctaatgtcaatatgtttccttgcattgcttcttctatgccttcttccttaccatctggcactggtttggaagcattcatccctatcaagtcatcttcagttaattcctctggtgtggtgtatattaactcttgaatttctcccaatagtcatatcttgaaacctttcacccttcaccattttttttctcgccatttccacaatctctttcatgatctccttgtttagctctgttataaatcctgtgcagtcatgcacracatctggacacagctttctccagcaggagtttattgtttggggcttgatgtggcatcctactgaagcctttcatgttctctctgtcagsgttttcttccacagtgttgacaattctttccatagagtaccatgtgtaatgrgcctttmaaggctcttatgaccccctaatgtagaggctgatatcatatttggagccaagtagaccacttcaatgcctttggtgttgaattcatagagtttgggtggccagaggcattgtccaatatcaaaagaactttaaaaggcagtctcttccttgcttcagggacaaagcattgatggaaccaatctagaaaaagaattctggttttctaaatcttcttgttatacaatcaaaagatggcagcaggagtttatcttttcccttcaaggcttgagggttagcagctttatggataagggcagtcctgattttaaacctaacagcatttgcacaaaacattagagctagcttacccttcttaaatcctggtgcttgcttctcttccctactaataaatgtcctttttggcactattttccagaatagggcacttttgtctgcattaaaaacttgttctgggatacatactttctcctcagtgattttctggatacatgtatattcaaatcctttgcccattttaaaatcaggctttttattgttgagttttaagagttattcatatattctggatactagacctttatcaggtagataattgcaaatattttttcacattttgttagttgtcttttttctttcctgatgtcctttgaagcataaatgattttgaatttggtaaagttcaatttatattttattttgttgcttctttgatgtcataaagataatgcaaactcctgaaggtttacaccaaagttttcttctagttttagctctgttatttgaatccttaataaattagagttaatttttgtatgtggtgtgagatgacagtccatttttatcttttttgttccagatattcagttgtcctagcatcagttgttgaaaacattgttctttctccactgaatgattttggtacccttagagaaaatcaattgatcatagatgtatgggtttatttctggactctcaattctattccttttatatttattctatccttatatcaatatcacatacttttgattgctatagctttgtttaaagtaataacctaaacagtaatttttaaccagagcagggtaactagaattacccgtaaagctggttcacctggttctatctgtatatgatgaagtagcttgtattttatagaataactataaaatctagtaaaaattaagcaacataagcaatcaccacaactgtttaagggcaatgggcagtaaccaagcctgtcaggatttgtggggccataggataaacacaaagaaaaccacatttaagaacatgagagtaaaatggctgaaaaccaactacaaagagaaaatcctaaaagccaccagtgaaaagttatacattattttctaaggagcaaaaaaatactgatggctgggtgtggtggcttatgtctataagcactttgggaggacattgggggaggatcgtttgaggccaggaatttgagaccagcctgggcaacatggcaagaccctgtccctacaaaaaatttaaaaataagccaggtgtgatggcacatgactgtagtcccagctactcaggaagacaggaggatcacttgagcccaggagttcaaggccacagtgagctgtgatcacgctgctgcactccagccagtgtgacagagtgagatcccatctctaaataataatgatgataataataataaatatttgtagctttctttacaaaagatgtttacaaaattatcattggaggagcctagcttagttcatgagtcaatagtttattggttattactgttcaggagttacagtgctggtgaaatgcactgtctttcagaatgctgtggtccatctctgatgaatgccagagataatggaataacattgaatactaaacttttttaaaaggctgtgaacattgtattctatattaaagtatgttttaaaaatgaaataatatttttaaaaaaaacaaagttcactaccaagagatctacatataagaaatgtcccctctccctctccctctccctctccctccctctccccacggtctccctctccctctctttccacggtctccctctgatgccgagcggaagctggactgtactgctgccatctcggctcactgcaacctccctgcctgattctcctgcctcagcctgccaagtgcctgcaattgcaggcgcacgccgccacacctgactggttttcgtatttttttggtggagacggggtttcgctgtgttggccgggctggtctccagctcctaacgtgagtgatccgccagcctcggcctcccaaggtgccggggttgcagacggagtctggttcactcagtgctcaatggtgcccaggctggagtgcagtggcgtgatctcggctcgctacaacctccacctcccagccgcctgccttggcctcccaaagtgccgagattgcagcctctgcccagccgccaccccatctgggaagtgaggagcgtctctgcctggccgcccatcatctgggacgtgaggagcccctctgcctggctgcccagtctggaaagtgaggagcatctctgcccggccgccatcccatctaggaagtgaggagcgcctcttcccggccgccatcccatctaggaagtgaggagcgtctctgcccggccgcccatcgtctgagatgtggggagcgcctctgccccgccgccccatctgggatgtgaggagcgcctctacccggccgcgaccccgtgtgggaggtgaggagcgtctctgcccggccgccccgtctgagaagtgaggagaccctccgcccggcagccgccccatctgagaagtgaggagcccctccgcccggcagccaccccgtctgggaagtgaggagcgtctccgcctggcagccaccccatccgggagggaggtgggggtcagcccccaccaggccagccaccccgtccgggagggaggtgggggggtcagccccccgcccggccagccgccccgtctgggaggtgaggggcgcctctgcccagccgcccctactgggaagtgaggagcccctctgcccagccagccgccccgtccgggagggaggtgagggggtcagccccccgtccgggagggaggtgggggggtcagccccccgcccggccagccaccccgcccgggaggtgaggggcgcctctgcccggccgcgcctactgggaagtgaggagcccctctgcccggccaccaccccgtctgggaggtgtacccaacagctcattgagaacgggccatgatgacaatggcggttttgtggaatagaaaggggggaaaggtggggaaaagattgagaaatcggatggttgccgtgtctgtgtagaaagaggtagacatgggagacttttcattttgctctgtactaagaaaaattcttatcctgttgatctgtgaccttacccccaaccctgtgctctctgaaacatgtgtactcagggttaaatggattaagggcggtgcaagatgtgctttgttaaacagatgcttgaaggcagcatgctccttaagagtcatcaccactccctaatctcaagtacccagggacacaaacactgcggaaggccgcagtgtcctctgcctaggaaaaccagagacctttgttcacttgtttatctgctgaccttccctccactattgtcctatgaccgtgccaaatccccctctgcgagaaacacccaagaatgagcaataaaaaaaagaaagaaagaaaaaaaaaaaaaagaaatgttaccaatatcaggaatgaaaaaagggacatcactacagcatacacagacataaaaaagatactaagaggatcttatacttttataccaatgcatttgaaaattttaatgaaaagaataaattccttgaaaaactcaacttaccaaagtagctgaagaataattagaaaatctgaagagtaactccaggttcagacggcttcattggtaagttattttaaaatttaagaaggatatagtatcactcttacataaactctttcagagtttagaagcaggaagaacatttccaacctcattttatgaggcctatgtaatcttcatataaaaaccttacatgggcaccaaattataattcagtccccatcatgrccacaaatggggaaagctttaataaaataggatcaaatgaaatctagtgatatataaaaaggaaagatatatcacaagttgaattctttttaggagtgcaatattggtattaattaacaaaaataaaaataattcttcatattacaaaataaaggaggaagaaaaatcatcttaatagatgtagaaaacatatttgatcaaattcaacaccttttcatgttaaggggtacttacagaaacctacaacaatcatgtttgaaggaaaattttaaattcttgctcacagagattaggaatgagacaagaatgtctactatcatcacttctgttcaaccgtgtactggaagtcctagccagtatcacaggcaaaacagaataagaaagataaggattaaaagggaagaaatagaatttccattactcattgccaatataattaataggtagaaaaaatatgaatctatacactggttattatattattttatttcagttaatgagcaaatttatcagagctgcttgacacatgatcaatttaatataattctatgttcaaaaattgtatttctgtattttgccacaaacaattataaaatgaaaataaagatatgatttgcaatgatacaaaaaagtaaacatttaggagtaactagtgaaacaagtttataatttttaaacagaaaactacaaaacaattttgacaaaatttaaagaaaaacctaaataaatggagagatatattatgttttgtagtttcaatatgctttcagttctcaccaatttgagctatatattcaatgcaatcccaatcaaaagtctagcataattttatagaaactgacaatctgattttaaatatgagaataaatgcaaagggccaaaatagccagggcaaagttgaagaagacaaagttgtaaaactcacgttactttacatcaagatttataacaaagttataaagttgcaacaaaggtaccactgcaatggagcacggaaaggatggccttttaaataaatgatgttatttcaactgaatattcatttattaaaaagttaatcttggtgccttctttatagcattcacaaaatatgtatcattttgctaaaaatgatattaccaggacaaatagcagaatgtgaatgggtttgagaattagatgacattattacattgtatcaatgtaataatttcctaatttttatgattgtattgttatgtaagagaatgttctcattggagaaaatacacaataatatagttaatggtgaaggggcattttgttggctatttacattaagatatttcagataaaaaaattttgtactgtacttgcaatttttctgagggtttgagattgtttaaaaataaaaaagttgagggggcgtgttcccgtcggctgcgcccgcggcccggggcggagttggccaccgcgcctggctgcgggcggccgggcgaacgggctcggcgcgcaggtggctcctccttcgcttctcccgatccccggccgtgccaggcacggtgccggctgccgagggaacgcctttgtgcccggtcctgggaacccgcgacggccgccgcgcgccccggtccattgtttcgcttctctgggttccaggtaggtgcgggcggcgcgcggggtccgcacgacgtgtcaccccggcggttggggcgccgggacccgcgggcgccggcaggggcgttcccgggcgcacggcggcggtgcagcacctgaagcggtggtggtcggccagcggcggcctcctgcacctcaccctcctgcaccttaccctcctgctgagctttgctgggctccgtgtagacctagacctttacctgctactgccgccgcccaccctgctccgggacgagctgctgttcctgggcggcccggccagctccgtctacgcgctcagccccttctcggcctcgggagggagggggcgcgcgggccagttgcaccccaagggccgggagctggactctgccgcgccgcccgagggcccgctgctccgggaggtgcgcgctcggggtccccttcatccctctcaccccggtggatgcgtggctggtgcacagcgtggctgccaggagagcggacgaggcccacgggctgctcggcgccgccgccgcctagtccaccggaggagccggcgccagcgtggacggcggcagccaggctgtgcaggggggctgcggggactcccgagcggctcggagtggccccttggacgccggggaagaggagaaggcacccgcggaaccgacggctcaggtgccggacgctggcggatgtgcgagcggggagaacgaggtactaagagaaaagcacgaagctgtggatcatagttcccagcgtgaggaaaatgaagaaagggtgtcagcccagaaggagaactcacttcagcagaataatgatgatgaaaacaaaatagcagaggaacctgattgggaggcagaaaagaccactgaatctagaaatgagagacatctgaatgggacagatacttatttctctctggaagacttattccagttgctttcatcacagcctgaaaattcacggagggcwtctcattgggagatattcctcttccaggcagtatcagtgatggcatgaattcttcagcacattatcacgtaaacttcagccaggctataagtcatgatgtgaatcttcatgaggccatcttgctttgtgccaacagtacatttagaagagatccaatagcaaggacttcacagtcacaagaaccgtttctaaagttaaattctcataccaccaatcctgagcaaacccttcctggaactaatttgacaggatttctttctccggttgacaatctttttttttttttttttttttttttttttttttttttttgagatggagtctcgctctgttgcccaggctggagtgcggtggcacaatctgggctcactgcaacctctgcctctcatcttcaagcgattctcctacctcagccttccaagtagctgggattacaggctcctgccaccaaacacggctaatttttgtatttttagtagagatggggtttcaccatcttggccaggctggtcttgaattcctgactttgtgatccgcccgcctcagactcccaaagtgctgggattacaggcgtgacgaccgtgcccagctgagactgggatcttttttttgagacagagtctctgttacacagagtgcagtggcacaatctcggtttactgcaacctccaactcccaaattcaagcaattctcctgcctctgcctcctgagtagctaggattacaggcacacaccaccatgcctggctaatttttttgtatttttagtaaagacagggtttcaccattttggccaggccggtctcgaactcctggcctcaagcaatccacctgccttagcctcccaaagccctgggattacaggtgcgagccaccacacccagcccagatggggacctctgaataaagggagggtaagaaaataattttcagcatctactggtacagtgactcataaagatatgaggatcttgaacagcaacaaatgatttaaaaatggaatattctgtctctgagatctaaccttaggatcacattggtcttctttgaatctaagaataacatctaaagtgtttttggcaacccgtccaggaggcaacaaatatatnnnnnnnnnnnnnnnnnnnnttccaggcagtatcagtgatggcatgaattcttcagcacattatcacgtaaacttcagccaggctataagtcatgatgtgaatcttcatgaggccatcttgctttgtgccaacagtacatttagaagagatccaatagcaaggacttcacagtcacaagaaccgtttctaaagttaaattctcataccaccaatcctgagcaaacccttcctggaactaatttgacaggatttctttctccggttgacaatcttttttttttttttttttttttttttgagacggagtctcgctctgtcgcccaggctggagtgcagtggcgcgatctcggctcactgcaagctccgcctcccgggttcacgccattctcctgcctcagcctcccgagtagctgggactacaggcgcccgctaccacgcccggctaattttttgtatttttagtagagacggggtttcaccgtgttagccaggatggtctcgatctcctgacctcgtgatccgcccgcctcggcctcccaaagtgctgggattacaggcgtgagccaccgcgcccggccctccggttgacaatcttatgaggaatctaacaagccaagacctactgtatgaccttgatgtaaatatatttgatgagataatgtcattggccacagaagacgactttgatccaatcgatgtttctcagctttttgatgaatcagattctgattctgacctgtctttagattcaagtcacaatagtacctctgtcatcaagtctaattcctctcactctgtgtgtgatgaaggtgctataggttattgtactgaccatgaatctagttcccatcatgacttagaaggtgctgtaggcagctactacccagaacccagtaagctttgtcacttggatcaaagtgattctggtttccatggggatcttacatttcaacacatatttcataaccacacttaccacttgcagccaagtgcaccagaatctacttctgaacctttttcgtggcctgggaagtcacagaagataaggagtaggtaccttgaagacacagatagaaacttgaacgtgatgaacggcgtgctaaagctttgcatatcccttttttctgtagatgaaattgtcggcatgcctgttgattcaatagcatgttaagtaggtactatctgacagacctacaagtctcacttatccgtgatatcagacgaagagggaaaaataaagttgctgcgcagaactatcgtaaacgcaaattggacataattttgaatytagaagatgatgtatgtaacttgcaagcaaagaaggaaactcttaagagagagcgagcacaatgtatcaaagctattaacataatgaaacaaactgcatgacctttatcatgatatttttagtagattaagagatgaccaaggtaggccagtcaatccaaaccactatgctcttcagtgtacccatgatggaagtatcttgatagtacccaaagaactggtagcctcaggccagaaaaaggaaacccaaaagggaaagagaaagtgagaagaaactgaagatggactctattacgtgaagtagtaatgttcagaaactgattatttggatcacaaaccattgaaactgcttcaaaaattatatctttaagtactgctacttgaataactcagttaaggctctgttttgaagcttacatggacaaatgtttaggacttcaagatcacacttgtgggaaatctgggggagccataacttttcatgaaatgcattgtatacaaaattcatagttatgtccaaagaataggttaacatgaaaacccaataagactttccatcttggcagccatcctttttaagagtaagtcggttacttcaaaaagagcaaacactggggatcaaattgttttaagaggtatttcagttttaaatgcaaaatagccttattttcatttagtttgttagcactatagtgagcttttcaaatactattttaatctttatatttaacttataaattttgctttctatggaaataaattttgtatttgtattaaaaataaacttcccttttatacagaaaaaaagaaaaaagttaaagaatttttttaaaagggttgccaattggcgatgcatatatggaaaataacattgtagttaaattttaggtacctggattttgttaggtaatttcacttctttggattttagattcgttttccacatgagtggtttggtctcaaaagtctctaagttcagtgatgtaaattgaattttttgccttaaatatttcacattttaaaaagttgtatagtttactatcataagaatttaatggataaataaccttattatataatgtggattactatagaaattactggccctggaaaattagatagattctcttattctcagttttcttttcctcaaaataaggatagtaatgcctatatcatatgatagttgtaagaattaagtgagagcatttccctgtagtagctactgattaaaaagttacaaagtcaagagatgcaaaatgtaaatacatcacgtttttattaaattgatagactgccttttccaaaatacagtgctgtaaattgaattttatgcctcctatatattacattttgaaaaattgagtaggttcagaattagaagacaattggcaaataactttgttatatggcataggttaccatagtaattactgtctgggtgatactggaaaaataatttaagttttcttattatccttttcttctttagaatatcagtggaatttgaaacacattttgcttttatatccaggcattggaatccttttcattcaaatggcatagttgggtccattttgtgtgctagcttctttaggatccaatcttcatagcgttaattcctttttttaaagaagagaaccttaatgctccaaaggatataaggctaataatgcttctatagaagttgtaagaattgagaccatgcctctgtattaggtagattacaaagttatagactcaagtgtgtgaaaatgtaattatatcacaggttttggttaaatcagtagtcagtgtttaattagtagtattatgactatccaaattagctcattgatgagtcagtagtcatcccattacctccatgcctctttgcatgtgcaatctctcccttcccctttcttctggagttaacaattatctttttaaaaaacataygttttcctatagacctattactttttcccatgtttcagacaaaaaatttttgtacggtacttgcaacttttctgagagtttgagtttgtttagaaataaaaaaaatgtttaaaagctttaaaaaagggttgcaaattggtggtgtgtgtatatgaaaaacaacattgtagtcatattttaggtacctgaattttttttttcctactgaccggttgtatgatgttgcataggtaatttcacttcttggactttaaacatttctgacacagtcatgtttgaaatgttagtcaaacattgactatgatttttgaaatcataataaaaaatgtttgaatattaacattttcaaaacactcaaacacagttttatgtactttagatgttctgatttggattgtttctcccctacacccgctaaacagctgtcatcccaggatttctctttagtagtgttctatggctcacatgtttactgaatccctgtcatgatttactctttattttactgaagcacattttgcattaggttccaaagtaaaacagcatgggagatataatttttgagtctttgaatgcttcccaatatccatattttacctttattgtctttgattatttggccaggtattaaatggtaagtctctaacatagtgcttatcatgttatcataacaaagttactgtaattaagacagtgtggtattgacacaaaaaccaatagagtagaatacagagtccagaaagagatctacacataatatgcccatcgcctttacaacaaaggtaccactgcaatggagcaaggaaaggatggccttttaaataaatgatgttatttcaattgaatattcatttattaaaaagttaatcttggtgccttctttatagcattcacaaaatatgtatcattttgctaaaaatggtattaccaggacaaatagcagaatgtgaatgggtttgagaattagatgacatttttacattatatcaatgtaataatttctgaatttttatgattgtattgttattatgtaagagaatgttctcattggaraaaaaacacaataatatagttaatggtgaggggacattttgttggctatttacattcagatatttcagataaaaaaattttgtttagaaacaaaatatgtaggtataaggtagttgccttataaatggaagatagtattattgttggatcacattggagcgtggtttgtcctcttacatccagcaagctataccttctatttcacctataaattattttatttatacaatattctcaactgggaccagtttgactaagaactggaagaagaagctactcatgtcaacaaagggctgaagtaattatttttcacaatattaatatccagtgaatttcttagaaaacaattatgcttataggttattcatcagtttaatcattttaaggtaacataactttaagttaaataatgaaagacaattttgatttaaagcktattagtaatgcttcacaatgatttcagggccacatgtgaagtaatatgtggctcaagggataaaggttgactacctatatgtttctacttgaaaggcacagtggttaagaggatgggctttggaactatagggtctgttacttaaatcccatccctgccacttactgccaatgtattatttagtaaatcacttaatcttgctaacctcagtgttttcatctgaaaaacagggatgaaaatgcctatcttgggattattataaagacatttgtaatctggtaaagtgaaattgcttaaaacagtgtctagcacttagcaagtgccctgtgactgttagctattgtaatacactctggtttttaaaactatacaaatagttccatgtacaattctagaatcagatcttcatattttatgcaacctgaggctattaagtgataactaataacatatgctctatttctgctgttgaaacatttgcttttgctctccttttgcagctacacagatactcttagctactacccaaattctccagaatgatctagttgatgtctctgacctcaagacattattgatggacaaggaccttcatacagctaatgctatacttactgtaatgttaagacatgtacctgaacatggttagtagtttcaatgcgtctatcttataaggaccatcctctaccacaggggtggaaggtctatgggtaggacatgcagggatggagggtatcctgtggaagctgaggtgggatgactgctggacactggtactgcccctacaggtgtgccaaccctgagcttcatggggccaaacaaatggggaagtcagagctcatcttatccctgtgtgagtccactgacagtacctaggaggtgagattattttgtgaactgackgacatgcacagtggtcaatcagaatgccatccatagagtaaaacagggtcctggaggcccttttggtttttggaaggtaaattatgatgatatccagggataccagggggtgttgcacatagtggtggctcagggcagcagatatttataaatataaaaaataattttactattttaatgacaggtatagctgaatattatccatgatgggttcttaaaatgagttggggagtatttttttgttttgttttttaaaagagacttttttcttccttgaatgttgagtagaattcataggtgaagccatgtgggccaagagtttttttgtgaaaggctttggattatttatttaatgtctttaaatgaataggattaacaaggtattctattttcttgttagttttggcaagctatgtttttagaggaattcgttcattagatctgccttttcaaatgtattgaataaagttgttctctttttgacatctgacatagctgtaatgctatcctcattttaattctcaaaattagtggattgtagcttcttttttttactctcgattgaactccacagttttcaattttattaatcttttaaaaaattcaacctttatcttgattgacccttttaaaaatttatttcctctttattatttttgcttttatctttactataatgtctatacttgatcttagccaaaaggctgataagtgattactatatgctgacttattacaattcttttatttttaatttttatggataaataattgttatacacatttatggggtatgtgtgatattttgatacaagtattcaatatataatgatcaaatcaggatagttgggttatctgttacctcaagcattatcagttctttgtgttagaaacattccaatttcactctttgttattttgaaatataaaataaattattaactatagtcactgtattgtgctactgaacaccagatcttattccttctaactgtattttgtacccattaaccaacccctttttttaatctccttccgcctatatcctaacatctattttttctttgtttttttttaactcttttttttccttttttcagtcagcttccctagggtgaatatatcccaatttctagtgatgaatatttagctcaataattttaaggattttttttttgtttgtaatacatacctcacagcaaattttcctcaaagtactcatttaactacatcctacaagttttgatatatagtattttaattattgttcaggtcaaaatttttctgatttctgttgtcattttttcttcaactcatggttttagaggtatgtttcttaatttccaaaaatttgaggttttatagtcattacattattaatttctagtttaattgcattgtggtggtcagtgaacatactctgattttagtcttttgaagtttgttgaggcttgatttattgactatgataattttagtaaatattttatgtgattgagaagaatatatagtctgcagttgggttgggtgagagtgttctatatattagatcagatttattgtcaaattcaaatttttttatattcttactgatgttttatttctttgttcaatagttactgaaacagttgttctaaaatcttctacaattttataccatgattatgtatttgtctacttctccttttaattctgtcagtgtttgctgtctatagttttagcccatgttgttaacatgctgacttagaattaaggctgggcattgtgtttcatgcctgtaatcccagcactttggaaggctgaggcaggcggatcacttgagctcaagagttcgagactagcctgggcaagatggtgaaaccgtgtctctacaaaaactacaaaaattagctcagtgtgggccaggtgcggtggctcatgcctgtaatcccagcactttgggaggccgaggcaggtggatcacgaggtcagatcaagaccatcctggctaacacagtgaaaccccgtccctactaaaaatacaaaaaattagccaggcgtggtggcgggcgcctgtagtcccagctacttgggaggcttaggcaggagaatggtgtgaacccgggaggtggagcttgcaatgaggtgagattgcaccactgcactccagcgtgggcgactgagcaagaatccatctcaaaaataaataaataaataaataaataaataaataaataaataaataaattagctcggtgtgatagcgtgagcctgtagtctcaactacttggggggttgaggcaagaattgcttgagcccaggaggttgaggctgcagtgagctgtattcgtaccacttcattccagcctgggtgacaaagtgagaccctgtctcaaaaaaacagataaatcatccaaattaatagaacatttcattataaagtattcatatttgtttttaataatgcttttttcttaacatctaccttgatattagtatagcaacattggctatcttttttttagggataacatatcttttttgtcattttactttcattcttcctgtatccttatattttagatgtatctcatgaatagtacatggctttgccagcctgttagtgtcttaaaaaatgttttatttgaagtgtttacatttacagaagagttttaaagatagtacagagttcctgtgtaccctacccagcttcccctaatgttagcatcatacatagccatgtaacatttattaaaacaaagatattaatattgggacagtaccattcattaaactacagaatatatttggatttcacttgttttcactaatgttctttaatgtcccagatctagtctgggataccatgatgcatttagctgtcatgtcttattagccttctctagtgtatgacagtttctcagtctttccttctatttagtgagcatgacactttggaagagtattggtcaggtattttgtataaacccttagtttgggtttatctcatgattagcctggggttatgcgcttttgggatgaataccccgaaggtaaagtgccctttttattgcaacatataatgcattatattaacatgatttgttactgatgatattaaccttgatcacttgaagtggtgtctgccatattttttcgtcgtaaagttactgtttttccttctttcaaagtttttgttagatgcaagtcataaagtttagccccatgctcaagaagaaaattaagctattcttctrgagggaggagtatcaaagaatttggggacgtgtgttaaaataaccacagtaattaataaatattttggaggagatactttgagactgtgcaagtattctgtttctcctctaagtttctcccactaattttagcattcattggcagatgaattrctagcctgtagcaattattactgtgttgttctaatgttgattttctacttccctcattccttctacattttaaaattatttgaaattcttcggcagggacgatttattccttcactcccattaattaattagtaatatgtcttttaattaaaccatgtggttaacttacacttatgagattactaaagtatttggctttaaatctaccattttactagtactttctatttcagccacctgttccatatttccttttctcttggattttttactttaaaaattactcaatttcttagacaatagcaaaacaaatatgacaaaatgatataaaatccttttggtgtgataagtatgttcattattttattgtgattattgtttatttgtgtttacaaatgtcaaaactttgtcaaataycacagtttaaaagttgctgtctgttgtgatccagagcaatcagacaagagaaaaaaataaagggtatccaaatcagtaaagagaaaggcaaactgtcacttttcatcgatgatatgatcatatacccagaaaaccctcaagattcatccaaaaagatcctagatctgataaatgaattcagtagagtttcaggatacaaaatcagtgtacacaaattagtagcactgctatacaccaacaatgaccaagctgagaatcgaatcaagaactcaatccccttcacaacagctacaaaaaaaaaataaataaatacttaggaatatactgaaccaaggaggtgaaagatctccacaaggaaaactacaaaacactgctgaaagagagtatcagtgacacaaacaaatggtcatggatgtgtggaatcaatgctgtgaaaattaccgtactgccaaaagcaatctacagattcactgcaattcccatcaaagtaccatgatcattcttcacagaactaaaaaaagtcctaaaattcatatggaactaaaaaagagcctgcatagccaaagcaagactaagcaaaaagaacaaatctggagcatcacattacctgtcttcaaactatactgcaaggcagtagttatcaaaacagcatggtactgttataaaaataggcatgtagaccaatgggacagaatagagaacccagaattaaagccaaatacagccaactgatcttcgacaaaacaaacaaaagcatgaagtagagaaaggacatcctattcaacaaatggtgtggggataattggcaaatcacatgtagaaacacgaaactgtatcctcatcactcaccttatacaaaatcaactcaagatggatcaaagacttaaatcaaagatttgaaaccataaaaattatagaatataacattagaaaaactcttctagacattggcttaggcaaagagttcatgaccaagaacccaaaagcaaatgcaaccaaaacaaaaataaatagatgggacttaattaaactaaaaagtttctgcaaagcaaaagaaataatcagcaaacagacaacccacagaatgagagaaartattcacaaactctacatctgacaaagggctaatatcaagaatctacaaagaactcaaacaagtcagcaagaaaaaaacaaaaccatcaaaaagtgggcaaaggatatgaatagacagttctcaaaagaagatatacaaatggccaacaaacatatgaaaaaaatgcacaacatcactatttgtcagggaaatgcaaattaaaaccacagtgagataccaccttactcctacaagaatggccataattaaattgatgtcggcatggatgtggtgaaaagggaacacttttacgctactggtgggagtgtaaactaataaaaccactatggaaaacaacatggagattccttaaaaaactacaagtaggtcttttgactccttggttcagtatattcctaagatttttttgtttttgtttttgttttttttgcagctattgtaaaaggggttgagttcttgatttggttctccacttggtcactgttggtgtatagaagaactactgatttgtgtacagtaatcttgtatctggaagctttgctgattcttttatcagttctaggaaccttcaggaggagtccttagggtttttgaggtaaacaatcatcatctgcaaatagtgaccgtttgacttcctctttaccagtttcgatgcctttctttctcttgccatattactctggctaggacttccagtactatgttgaagaggagtggtgagagtgggcatccttgtcttgttccagttctcagaggraatgctttcagctttttgccattcagtattatgtcggctgtgggtttgtcrtagatggcttttattacattaaggtatgtcccttgtatgcctattttgctgagggttttaatcataaagagatgctggatttgtcaaatgctttttctgcatggtcatgttatttttgcttttaatctgtttatgtggtgtatcacatttattgacttgcatatgttaaactatccctgcatccctggtacgaaacccacttgatcatggtggattatctttttgatatgtcgttggattcggttagctagtattttgttagggattttagcatctacattgatcaaggatatcagtccgtagttttcttttttggttatgtcctttcttggttttggtattagagtgatgctggcttcatagaatgaattagggagggttccttctttctctgtcttgtggaatagcgtcaaaagggttggtaccaattcttctttgaatgtctagtagaattctgctgtgaatcatctggtcctggactttttttgttggtaatttttaattaccatttcaatcttgctgcttgttattggtctgttcaggatacctaattcctcctgatttaagctaggagagttgtatttttccaggaatgtatccatgtcttctaggttttctgatttatgtgcgcaagggtgttcatagtagccctgaatgatcttttgtatttcagtgatgtcagttgtaatatctcctgttttgtttcttagtggggttatttggattttctctcttcttttcttggttaatctcaccagtggtctatcaattttatttatctttttaaagaaccagctttttgtttcatttatcttttgtatttttttttttcaatttcatttagttctggtctgatctttgttatttcctttcttctgctgggtttgggtttggtttgttcttgcttctctagttccttgaggtgtgaccttagagtgtcagtttgtgctctttcagtctttttgatgtaggctatgaactttcctcttagcactgcctttgctgtatcccagaggttttgataggttgtgtcattatggtcattcagttcaaagaattttaaaatttccatcttgatttcatttttgacccaatgctcattcaggagcaggttattcaaattttcttgtatttgcatggttttgaaggtcccttttggagttgatttccagttttattccattgtggccagagagagtgcttgatataatttcaattttcttaaatttattgaggctcgctttatggcctatcatatggtctatcttggagaaaattccatgagctgtgaatagaatgtgtcttctgcagttattggatgaaatgttctgcatacatctgttaagtccatttgttccaaggtatagtttaagtccattgtttctttgttgactttctatcttgatgaactgtctagtgctgtcagtggagtattgaagtcccccactattattgtgttgctctccacctcatttcttaggtctattagtaattgttttgtaaatttgggagctccagtgttaggcacatatatgtttagaattgtgatattttcctgttggataaggcctttagcattgtataatgtccttctttgtctcttttaactgctgttgctttaaagtttgcttgtctgatgtaaggatagctacccctgctcacttttggtgtccatttgcatgaaatgcctttttccacccctttactttaagtttatttgagtccttatgtgctaggtgagtcttctgaaggcagcagatgattggttggtgagttcttacccattctgcagttctgtatcttttaagtggagcatttaggcctttgacattcagtgttagtattgaaatgtgaggtatggttacattcatcatrttctttgttgtctgagtactttggttttttgttttttgtttttgctttttaacttgtatttttgttttataggtcctgtgtaatttgtgcttaaaaatgttctgttttgatgtgtttccaggatttgtttcaagatttagagctccttttagcagtttttgtagtggtggtttggtaatgatgaattctcttagcattcatttgtctgaataagactgtatctttccttcatatatgatgcttagtttcactggatataaaattcttggctgataattgttttgtttgaagaggctgaagatagggccctaatcccttctaccttgtagggtttctactgagaaatctgctgttaatcagataggttttcgtttacaggttacctggtgcttctgtctcacagctcttacgagtctttccttcgtcttaactttggataacctgatgacaatgtgcctaggcgaagattgttttgctatgaatttcccaggtgttctttgtgcttcttgtktttggatatctaggtctctagcatcttggatatcaaggccagggaagttttcctcgattattcccccaaatatgttttccaggcttttagaattctcttcttcctcaggtacaccaactattcttagatttggttgtttaacataatcacagacttcttggaggctttcttcatatagtcttattcttttttttttttttgtctttgttggattgagttaattagaagaacttatcttcgagctctgaatttccttcttctacttgttcagctctattactgagactttccggagcattttgcatttctaaaagcgtgtccaaaatttcctgaatttttgatggttttttctttattcccttgactatttcccccttcacttcttgtatcatattttggatttccttgcattgggctttgtctttctctggtccctccctgattagcttaataactaacttcgtgaactctttttcaggtaaatcagggatttcttcttggtttggatccattactggtgaactagtgcgattttcctaccaagctttatgtaatactattcactttcagaatctgtcctgtacccaggttctaatattaatttctgcttccctcatataccatctcaagactgctatctttggcctcctgtatttccaagcttctttcttttatctccccagaggttaaggctttcatccatcagctctctgacttgttcttagtatttccctacacagcaaggggactctcttcttatgggtaaactctcattgatattatccatgttctgtattataaagatatttccttattctttcttctatgaaattgccacctgagtttcctctttgttttgttttttttttttttttttttttttagacagattcttgctctgtcgctcaggctggagtgcagtggcacattctcggctcactgcaacctccgccttgaaggtgcaagcgattcttctgcctcagcctcccgagtagctgggattacaggctcctgccaccacccctggctaatttttgtattttcagtagagacggggtttcaccatgttggcctggctggtttggaactcctgaccttaagtgatctgcccatctcagcctcccaaagtgctgagattacaggcatgagccaccatgtctggcctgagtttcctctttggtgtaggctctgaagctgactgcgctggtcctaaatttttatttcctgacttatatgcaaatacaaatgtttaatattctgcctcttagttacactgtaggcatggactataggttattttacttgccttacttgttaatttgtatggatttttggagaccacgtggagagattaaatttatgtgtctactgtcatactaaagcagtgtttctaacctttttttctcttgctcccctaagaagcctttatagacattttagttcctaattatcccccacccccatgaaaatttaataccacagatataccatatatctgtttaagtactatggccagaaactattgtaatatctgagattttttttttctcctaagaaccagttttaccccttgagagcagtatcactctcaatgagaatgtatgttctgaaagtatcttgaatttttttttcattgttgtactgccgaatcctataagtagtattttacttatactttaacacatgtatgagtaatattggtctataatttccctccctcacctcctcagtattatatttattctgtagttttgtaggcaattaggagctactgaagggttttatgcatgggaataatcaatttttttaaagaggaatacatcccttgacatactgtggaaaataaatagaagatgagactggtggcataggtttttaaagatgccattgtaataataaaggtattagttaatgcagtagtaaattcaagaagtatttggaaataaaatgagcagaaattgataatcatatgcatgcaagaggtaagggagaagaaatagcccagccttactctcaagcttttaacttctgttataatttgactattagcttcagctatattatttaattctgaaacaataattctttcttttaagtaaattatgctttgccttacagaaagtggcaaggttagcattcaagaatttatgactaaattatccgatatattgacaattcctaaagctgcaggtaagttttatttaatatgtacttattgcccagatctagaaaggcaagcagtggtttacatgttaaaaacaatacaggattcgatagttaaagcacaggtaagtaagaagcaatacaatatgaatataaaacaacacaagattagtttacataacttctgtttgaattctaaggcaaatattgctaagcttaacccaaactcaaaattttaggtagtcttacttgatagtgctagaaaattactagattatatattattcagtatgcatatttgacttctgaaattattagaaaataatttttaaaacttttgacaaatccagtagaatttttatcactatctgttatgttctcatgtatcttcagcgactctcttgatcacactttttaaacattcatgctttttgaggtataatgtacatatggcaaaattcactctttttaggtatacagttctttggattcttaaaaataatgtaatgtaacccttactatacacaacatatagactatattatcccccagaagtctcttatgcccttttggtaatccatttcttcctctaccctgagcccctggcaactactgattcattctttgtccctctagttttgccttttgtggaatatcatgtaaatgattaaatatgaagtggtttgagtttggcagtcattgcatgcatataccttgaatttactttgtttatactctcatttatactaccaaccctccctagaaaaaatggattctgattggttctggttgcagtattacaaattccaaataaagctttatttgaggacccccaaagttgaggtactgatccctttggctgtttgtttcccactaagttgtgtgtgtgtgtgtgtgtgtgtgtgtgtgtgtgtgtgtgtgtatgtgtaaccaacattttgttgaatcaacaatgtaccattagtaaagctgctgtgcaaaattatccctcagatctgttctaaacttacagtttaactgattttattgtcctcacctaaggttatacaattcattttttggaagaaaatactaggacattaaatcaagatggttacttttgctattttgctgaagattcatatttaaatataaatgaagaagttaatctacacattagaagtgttttaaaaaatgtttaaattgatacataattgtactttcatttatacattgtataataatcaaatcagtgtaagtagcaacccattgtgaaccccaaatatcagaaacaggattcaattaatttagaaagcttatttttgccaaggttaagggtgtgcccatgacacagacttaggaggtcctgacacatgtgcctaaggtggttggggcacagcttggttttatacattttagggagacatgaaatatcaatcaatacatgtaagatgtacattggccagaagggcaggggaaagacaatttgaagcggggaatttccttatgggcaaattgtgagggagttaatgtagcttcttcttttattttattttattttattttattttattttttatctctgttgctatctcctttaggaatagaatgggaggtaggtttgcctgacacagttcccagcttgacttttccctttggcttagtgattttgggataccgagatttattttcctttcacaccatcagctcaaacatttatcatttctttgtagtgagaacattcaatacattattaactatagtcaccctttaatttttaaatagacaaatacaaattgtatgtactgtatattgcatgattcaaaatatgtacatacattgtggaatggctaaattgaattaattaacgtgttttacctcacatacctatttttgtgatgagaacacaaaatcttttctcttagcaattttcaaaaatattatacattgttattaactgtagtcaccatgttatacaacagagctcttaaccttattgattttctaatattttattaaagatttttgagagtatgtttatgagggatattggtctatagttttcttttagtgtcttttccagatttttttgttagggttatgctgacctcataaaatgagttgggaagtcttccctcccttttttatttctggttgagtttgtgcattagttggttctaatgctgctaataaagaaatatctgagactgggtaagttataaaagaaagaggtttaactgactcacagttccatatggctggggagacctcacaatcatggtggaaggcgaatgaggagcaaattcacctcttacatggcggcaggcaagagggcttgtgcaggggaactcccatttataaaaaccattaaatctcgtgagacttattcacttatggggacactgcccccatgattcgattatgtccactggccccacccttgacacttgaggattattacaattcaaggtgagatttgggtggggacacagccaaaccatatcagtttatgattatgattaggattattgttttcattaaatgtttggtagaattcaccatctattcctgaagatttaaaatattgagctctatttattcaatggatatatagctctttagagcctccctcttctaaatctttctgtagttgtcactatatctttctgtaagtatcataaagaagaaatatactttctataagtggaactgtgtcttgtcaaagtttattttatgtaatttgtcaggtttattgtcatgaaattgttcataatatccccttattatccttttaatgtctatagtgtgatgtcttatttttcattcctgatgtttgtaatttctattttctcttttttgtttgtaaccagtcttgctagggagttattaaatttattaataattttacacaaatggtgattttgttaatttttgttaacttttctcttttgtttttctttttcattggtttatatttttattgttactatcatttggtctttgtttactttgggcttcatttacccttctttgctagcttgttaagatagaagcttagataactgatttttatccttttctaacattaaaactgcaaattttcccctaatatgtctttcattgcatctcacaaacgttgttatgttgtgctttttatcatttactaaaatattttctaatttacctaatgattttttctttgaagtgtaggttatttagaaatgtagtctttaatttccaaatattgggacattttctagatatcttaattattattgatttctaatttatttatttcttttagggagagggtcttgcttgttgctcaggctggagtgcaggtggcatgatcatggttcactgcagcctccaactcttgggctcaagcaacctcttgcctcagccttgcaagtaactgggactacaggcacacaccattacacctggctaattttaaacattttttctgtagagatggggtctcattttgtgttccaggctggtcttgagctcctgggctcaagcatttctcctgccttggcctccccaagtgttgggattatagttgtgagccactgtgccaagcctgatttctaatttaatacatttggccagagaatatattttgcatgatttaaattcttaaattaattaagatttatttatagccctggttatggtctatctaagtgaatgttccatgtgtacctgaaagaatggcttgaactcgcggggaggaggttgcagtgagccaagattgcaccactgcactccagcctgggcaacagagtgagactccatctcaaaacaaaagaaaaaaattttttggttaagagtttagataaaggaaaaaactccatttaaatgtttctgtgaagaaaaccataatggattacatggcacaacaacagtttcaaaaaattaaaaccaatttgtaaacattaatcatcacggttacttatatgcccttaaaaatgatctatatgctcctagtgtcacataagacacgttaatctaggagtctacttcactcagactttttgcaactaacatgcattctttgtttcttcatcactgtggggaagaggtggtacatacaaaaggttcttgacataaccctataaaaagatgatcacatggtgtattatctgggaatttaaatggtcacaattccaggatacgtcaatgctatcaactttaaaaaataaataaatttgacctataatgggggggccagccgggggtaggggagaaagaggcaaactgtgtatcctggaactttgtaactggaaaaaaattagcagcagcagcagcctgatcaaaactgcaacttcttgcccacctggacaacccagctctcttttctagaaattagcatctatgctcaatttctaataatggaatggtgcctaggtactcatgtttgtctaggtgaaaacagcttctaaatccaggtgcttacatcagaattgctctcctggaaatttaggactgagacattgagtcacttacctgtagggtaacctgtagaatcagagatttctcaaatttgacctgtcttattttgataccatgtttcccagcaatgtaacctccccttaagtatcagtttttgtaaaatctcctaatcaatttcttatcagattatattatataaatacctatcatctagagtactccagaagccaaatgaacattaaaaaaaaaatactgagatagggccaggcatagtggctgagtgtaatcccagcattttgggaggctgagttggaaggataacttgaggccaggagttcatgaccagcctgggctatatagcaagacgctgtctctctaccaattctataaatattaaaaaaaaaaaaaactgggtgtggtggtggcacttgtactcctagctacttgagaggctgaggtgggaggacggattgattgaggccaggagtttgaggctatcgtgaaccataattgtccactgcagtccaccctggggtgacggactaatagactctgtctctaaataaataaatattacaaaaagaaaagcactgagataggtaatgttggtaagtgagattatagattttaatctcatgaacaattttaagttagctactatacactcccatttccaaaagtttagattggaatgtttgctgcctttggtagctaagagaaaagaaataacaatgagggatattatagtgccattcttccacagtccttatcaaataaataggcctttgagtcttggaattgttgagagtaagaaagcaaataatatataaagttgacaagcacaaaagacacaaagaggccaggcatggtggctcaagcttgtaattccaacactttgggaggtcagggcaggggggttgtctgaatccaggagttcaagaccagcctaggcaacatagtgagatcccatctctacaaaaaataaaaacaaaagtagccagacatgaatggtgcatgcctgtagtcccagctactcaggaggctgaggtgggaggatcacttgaggctgggaggtcgaagctacagtgagctgtaattgcaccactgcactccagcctggggaacagtaagaccatgttggaaaaaaagaagaggggaggggaaggggaggagagaccacaagaaacaaatataatgaataatagtttactattcctgagaaaaagagaataccaaatgtaagagaatgtgtaactagggttggggagagcgggctggagagagacagcacacaaagacaacagagagaagtcaaataggaaatttcaaaatgagaatcagctgatgtataaaaaagagcaaaataatttttttaccgatagaactgcaagatttagctttccaaaatgattcaattctccagaaaagaaaaattaatttaagcactcatctaagtaactagtataaagtgccaagcaaaaataaacatttattagatatagacaaatgcaaatatattcaatgctttcgtacaaatgtgaatatctgggggccttattatcatcttgttaatatatgccagtgaacaatttgtagacacaagacttgttttacaaactgggtaatatgttccatgaacgtaagccaggaatttaaaacttagtgtctatctcttcattctaagaaatgtttcagctaactcactgtgtgtgtgtgtgtgtgtgtgtgtgtgtgtgtgtgtgtgtgtgtttgtgtatgttttctatctcatgtggtggtgatgagcctagtacttatattcttgaaatgaaaatcccattctgatatttcttcctccctcttctctgtcacattaaactgatcaccaggctggtcagctgaagctcttacatattaccgaatgtctctgtcccgttgttcctactacttcagatcctcattccagtgtctgggacactgtcagagtctaaatagattctaggtctcttgtctcgtctatcttccatctcccaatcctccttcccctgatccattagaatgacagacctaagcatatcctttctgaacataaaaacccttcaataactttagggataaactttaggctccttaacatgatgcatgaggtgcctgaacatctgacccttgacagtccctctcagcattctggcacattcagggtcctaacaataccacccttctccctgccaccatcccaaatccctccccctgctcaccactctccttgttattttccacttcaaagcttttgctccttcaatctgtaaaattaacagccactcatgtgttccttcctttctcctctcttcacagccagcacctggaggtttcttactcttaggaaaaactgcgaccttttctaagatacctcctcc

SEQ ID NO: 97417 - DNA, 33690 bp, Homo sapiens
gtctccctctcatgcccaaccctctccctctctttccacggtctccctctcatgccgaaccgaagctggactgtgctgctgccatctcggctcactgcaacctccctgcctgattctcctgactcagcctgtcgagtgcctgcgattgcaggcgcgcggcgccatgcctgactggttttcgtatttttttggtggagacggggtttcgctgtgttggccggactggtctccagctcctaactgcgagtgatccgccagcctcggcctcccgaggtgccgggattgcagacggagtctcgttaactcagtgctcagtggtgcccaggctggagtgcagtggcgtgatctcggctcgctacaacctccacctcccagccgcctgccttggccccccaaagtgccgagattgcagcctctgcccggacgccaccccgtctgggaagtgaggagcgtctctgcctggccgcccatcgtctgggatgtgaggagcccctctgcctggctgcccagtctggaaggtgaggagcgtctctgcccggccgccatcccacctaggaagtgaggagcacctcttcccggccaccatcccatctaggaagtgaggagcgtctctgcccggctgcccatcgtctgagatgtggggagcgcctctgccccgccgccccgtctgggatgtgaggagcgccttggcccggccgtgaccccgtctgggaggtgaggagcgtctctgcccggccaccccgtctgagaagtgaggagaccctccgcccggcaactgccccgtctgagaagtgaggagcccctccgcccggcagccgccccgtctgagaagtgaggagcccctccgcccggctgccaccccgtctgggaagtgaggagcgtctccgcccagcagccaccccgtccgggagggaggtgggggtcagcccccgccaggccagctgccccatccgggagggaggtggggtgtcagccccctgcccggccagccgccccgtccgggaggtgaggggcgcctctgcccggctgcccctactgggaagtgaggagcccctctgcccggccagccgccccgtccgggagggaggtgggggagtcagccccccgcccggccagccgccccttccaggagggaggtggggggttcagcccaccgcccggccagccgccccgtccgggagggaggtgggggggtcagccccccgcccggccagccgccccgtctgggaggtgaggggcgcctctgcccggctgcccctgctgggaagtgaggagcccctctgctgggccaccaccccgtctgggaggtgtacccagcagctcattgagaacgggccatgatgacaatggcggttttgtggaatagaaaggggggaaaggtggggaaaagattgagaaatcggatggttgctgtgtctgtgtagagggaggtagacatgggagacttttcattttgttctgtactaagaaaaattcttctgccttgggatcctgttgatctatgaccttacccccaaccctgtgctctctaaaacatgtgctgtgtccactcagggttaaatggattaagggcggtgcaagatgtgctttgttaaacagatgcttgaaggcagcatgcttgttaagagtcatcaccactccctaatcgcaagtacccagggacacaaacactctgcctaggaaaaccagagacctttgttcacttgtttatctgctgaccttccttccactattgtcctatgaccctgccaaatccccctctgcgagaaacacccaagaatgatcaataaaaaataaaataaaattaaattaaaaaaaaaaaaaagagaggaacccacaaaaaaaaaaaaaagaaagtatataaaataaaatattgaagtcctttcccattaaaaaaaaaaaaaaagaaaaagcacggactctttcatccagttctgatgtgattatctctggaaggcattttctcctcctcttccctccacctccattcagagtcactgacttataccttttacatattcacatgaaattcacttaatatatacacctatatactcacaaaaattaaaaattaaaattaaaaaaattcctggcccggcgcagtggctcacgcctgtaaatcctagcactttgggaggccgaggtgggcggatcacgaggtcaggagatcaagaccagcctggccaacatagtgaaaccctgtctctactaaaaatacaaaaattagccaggtgtggtgcacgtgcctgtagtcccagggaggtggaggtgggagaatcgcttgaacacgggaggcggaggttgcagtgagccgagaccacgccattgcactccagcagccagggtgacagtgagagtccgtctcaaaaagaaaaaaaaaaaattcccttaggcccagtgcagtggcttatgcctgtaatcccagcactttgggaggccaaggtgggtggatcacttgaggccaagagtttgagaccaccctggccaacatggtgaaaccctgtctctactaaaaatataaaaattagctgggcatggtggtgtgtacctgtaatcccagtactcaggaggctgaggcgcaagaatagcttgggcctgggaggcagaggttgaagcgagccgagattgtgccactgcactccagcctgggtgacagagtgagactgtctcaaaaaaaaaaaaatttttttttttcatttttttcaatatacaatctgaaatgatcttttaagtttatatgctctgatttttttttttaatctaaaagaaatcaggaccaggtgcaatggctcatgcctataatccctacactttgggaggctgaggaggattacttgagcccaggaggtcgaggctacagtgacctataatcagctttgggcagtggcagtatcatagccagtaaggtttatccgaggcacaattattactgattattgccaattgaaacagtgagttatgatcatgccactgcactccagcttgggtgacagagaccttgcttcaaaaaaagaaagaggtcaggtgtggtggcccacgcctttaatcccagcacttcgggaggctgaggcaggtggattacttgaggtcaggagtttgagatcagcctggccaacgtggtaaaaccctgtttctactaaagaaatataaaaattagccaggtgtggtggcacgtgcctttaatcctagcctgggtgacaaagcgaggcaagactccgtctcaaaaaaaagaaatctgatagacttcacttgtaatggatatttaattctatatttcatgttatcttttgtaagaatttaagattagtcaacaccaatcctatactcctctagaaaagtatctttgtagctctactcattatttcttatctctaacctaagttactttattacatattaatctgttcatttgttcacttgctcattgatgtaataaattagtaatctcaatttattggttacttgtttgatagagtcttcaatgtagaaatgttgtcaaagcttttttaaaaaaatttaaataggccaggtgcagtggctcacgtctgtaatcctagcactttcagaggccgaggcgggcaggcagcttgagctcaggagttggagaccagcttgggcaacatggtgaaaccccgtctctaccaaaaacacaaaaagttagctgggcatggtggcatgcacctatggtctcagctactcaagagactgaggtgggaggattgcttaagcctgggaggcagaggtttcagtgagccaagatcagccaaaccactgtgcctggcccacataagtaatttttaatttgctagtatccacattcaaaaagtaaaaagaggggccgggtagagtggctcatgtctgtaatcccagcactttgggaggctgaggcgggtggatctcctgagctcaggagttcaagactagcctggctaacatggtgaaacctgtctctactaaaaatacaaaaattagccaggcgtggtggcacatgcctgtaatcccagctccttgggaggctgaggcagaaggatcgcttgagcctaggaggtggaggttgcagggaggtgagatcgtgccactgcactccagcctgggcaacagcgccagaccatgtttcaaaaaaaaaaaaaattagattaaaaaaaaaagtttaaaaaggctgggtggggtcgttcatgactgtactcccaacactttgggaggctgagatgggaggatcgcttgagcctaggaattcaataccagcctgggcaatatggcaagagactgtctttataaaaaattagccaggcgtggtggcacatgccggtagtcccagctactcaggaggctgaggcaggaggattgcttgaacctaggagttcaaggctgcagtgagccatgattgcaccactgcactcctgcctgggtgataaagcaagaccctgtctcaaaagaaaattaattttaatgtattttatttaacccaatattcctaaaatatttcaatatgtaaacagtattaaaaaaaaaaaatatatatatatatatttttttttttttttgagacaaggtcttgctttgtcgcccaggctagagtgcagtgggatgatcatagctcacagcagccttgaactaggttcaagcgatcctcccaagctgggattataggtgtgtgcccccaaccctgccacccctggcttaacttttttttttttttgagacggagtctagctctgtcacccaggctggagtgtagtggtgccatctcagctcactgcaacctccgcctcccaggttcaagagattcttcctgcctcagcctcccaagtagctgggattacaggcgtgtgccaccacacctggctaatttttgtatttttagtagaaacggggtttcgccgtgttgggcaggctggtctcgaactcctgacctcaggtgatccgcctgcctcggcctcccgaagtgcgggattataggcgtgagccaccgtgcccggcccaaattttttttttgtagacataggtctcactatattgccgaggcaggtctcgaactcctgggcttaaaggatcctcctgcctctgtctcctccgtgctgggattacaggcatgagccaccgcacctggcgatattttgcattctttttttcatacgacgtgtttgaaatccagtttgtacagtgttttacatttatagcacattcccactgggactagtcacatctgaagtgctcaaaagccactatggctagggctaacgtactggacaacacaatgctagaggagcccgtccctgaggacgctgcagtttataacatcatagttcctcctctttggactgctgctttccccctatgtattaagacttgcagagtgtaaacagggcgccgtgagtgtgcaaagcacacacaccttcgcaaacggctcactctgaatactgacctttcggctgtcctaccttcaacaggtttcccgtgcataggagatccaagacagcagaaggcaggagctggcgggacagggaggaagagcggctctgccgtttactatctgtgtgacgctgagcaaattacacacggtctctctgactcagctccttcctgtcacaaatggggatatttatagtatttctcactacgtaggtccttatgcgcattaaatgagctactacacggcattcggcatagcgccaggcacacactcaatgttcaatacatgtaggcggttagcccagtaaactggtagccggcctgagtaagtcccaggaaaagcccagaaactctggagacattacagcccaggtcgagaaccacggcccgggccgtcccggacgcgggcccaccaagcctagggaagccgctcggcaccgcttcggcttctagactccctggccggctctttcccgtcaaggctgcggctggagaggactgagggagacctagggagaggattcctcttctccatccacggagacaacttggatatgaacaccatggatgtgaggaggtccgctggaagcaggagggatggactcctggactctccagctacctgcgtggtcctccccggtgtgaggacagaagaccggtcctgggccgggcccgcatccagccctaccgccggtgtctgaggtgagggctccgtcagcggaaaacgctcgacaacggaggggcaggcagggccgggggcgtggtcaacgcgggccccgccccccgggctctacccccgagcgtacgcgcgcgcctgaagcagccaaccaggaagcgcagagcaggttcaaacacagacggcgggtgaacatggcgtcctcgacttggtctgagacgtgataggcctgccttctggttgaagatgtggcgagtgaaaaaactgagcctcagcctgtcgccttcgccccagacggtaagcgggagatctctggcggagagaactgggccgggctgctgtcgcgggggcaccggccgtgtctactgtcctggaaagttgggtcgagcccggggttgggggcttgtggagtctttgttcgccttgctgctcctrcgcgactagggtgcgagcgtactcttctaatcgcattttgggcttcttagggagggaggaggggcgggctggcagaacccaggcttcctcacactcgccctctttcttggtttctttctcagggaaaaccatctatgagaactcctctccgtgaacttaccctgcagcccggtgccctcaccaactctggaaaaagatcccccgcttgctcctcgctgaccccatcactgtgcaagctggggctgcaggtgagattcgcctggacagcttctcgactgggctgtttgcccagggtgagagctcaggggaacagagggccagggctacaataattaataacgataatgaagtcttctacgtcggtgacatccatttacagctattcaggccaacagagaggtgccctagggtggttaaaggaaatccagtgagaacttgaatctctgtttagctgttagtttttattacctcctcctcctcccttcgacctttatcaaactattgagaaatcctaccaccctgattagtgctcttcctccaacatggggtcacttacggaaaggtcagtcacctgcaagattgaggcaatatccatttactctaggaggtagttagaactctcctgggatcaagttacaccactggaaggtagggtacttgaatcaccttagtttaaactagctccttgcagaattgccctcactgatttgtacttttgttaaacgttttgagagacgtagccatgtagaaactgcatttcagttgctgtcaaaacttgtcaaggaagcagcttgactcctgtataagattcctccaagaaaggctttaggactaactgcctggaaaaattgtcttcctgaagaaattgctatccttttctttctgataatgagaactatgtagtttaccatattttccctcttgctctgccttctagaaagctcaaggccaaactggatcatcacatacagctactgttatagctgtataggaagttttgcttcctcttttttgaccatgactttgttatttcattaatcgtatctattcattttcatgcatatgaattatttttggaaggagatgggatatcaataaaataggtatgaggaggaaagaagagtgtatagacagatgacatcctgagtaacagaagtatgatgatagcatagcagtctttcttgaaagagttgcaaaatacctactgtccaatagaactttctgggatgagggaaatatttgataatctgtgctgtccagcatggtaactactagtcacatggttattgagcacttaaaacgtggctgaggtgactgaagaattgaatttttttgtttttgagacggagtcttgctctgtcacccaggctggagtgcagtggcgtgatcttggctcactgcaatctccgcctccagggctcaagcgattctcctgcctcaggctcctgagtaactgggattacaggtgcacaccaccacgcctggctaattttttgtatttttagtagagacagggtttcacaatgttggccaggctggtctcaaactcctgacctcaagtggtccgcccgcctcggcctcccaaagtgctgggattacaggtgtgagccactgtgcctggcctgaataattgaatatttaatttaatttaatttaattaatttttttttgagatggagtttcgctcttgttgcccaggttggagtccaatggcgcgatctcggctcaccgcaacctctgcctcccgggttcaagcgattcttctgtctcagcctccggcatgtgccaccacacccagctaatttttgtattttcagtaaagacgggtttctccatgttggtcaggctggtctcgaactcctgacctcaggtgatctgcccgcctccgccttccaaagtgctgggattataggcgtgagccactgtgcccggcctgaatttttaattttaatttcaatagctacatgtggctagtggctatcatattagacagtacagcttaagatgaaaaataaataagtactaggtggaaattagctctatagagcttatagaatttattatgattattaattaattaattaattttgagatgcagttttgctcttgttccctaggctggagtgcaatggcacgatcttggctcgttgcaacctctgcctcctgggttcaagcgatcctcctgcctcagcctccctagtagctgggattataggcacgtgccaccatgcctggctaatttttgtatttttaatagagacggggtttcgccatattggccaggcttgtctcgaattcctgacctcaggtgatccgcccacctcagcctcccaaagtgctgggattacaggtgtgagctatggcgcccagcctgaacttatagaatttaaccataattatttaatcacaatagcagaatactagattgaaatcgaattctccttccctcttaactgctgggcttactacctccagatgcagtcagctacacaatgaaaagggtttttccccaataaaatagcaattatttttgttttgtaaaaatttttttttttttgagagtctcactctgttgcccaggctggagtgcagtrgcacaatcttggctcactgcaacctctgcctcccggattcaagcaattttcctgcctcaccctcccaagtagctgggattacggtgtgtgccaccacgcctggcagattttttttttgagacggagtcttgctctgtcacccaggctggagtgcagtggtgccatctagggtcactgcaacctccgcctcccaggttcatgcaattctcttgcctcagcctcctgagtagctgggattacaggcatgtatcactacgcccaggtaatttttgtatttttagtagagacagggtttcaccatgttgggggtcaggctggtcttgaactcctgacctcgtgatctgcctgcctcagcctcccaaagtgctgggattacgggcgtgagccaccgcgcccggcctaattttttttttttgagacaggatctcactccttcatccaggctagagtgcagtggtgtgatctcggctcactgcaacctctgcttcccgggttcaagcaattctcctgcttcagcctccccagtagctgggattacaggcgcgtgccaccatgcctggctaattttttgtatttttagtagaggcggggtttcaccacattggccaggctggtctcaaactcttgacctcaagtgatccaccctccttggcctcccaaagtgctgggattacaggcgtgggccactgcacctggcctgttttgtaaatttttgattattaatagatattaattgtttgaagcatttgaatatataaatgtataaggaagaaatatttctggtatcttagataaatgtcatatttgacagttctttcatacatctctttatgtgtgtctattttgtatatatgcacacacacacacacacactcatctttatattgtctttttttttttttttttgagaaggagtcttgttgtatcgcccagattggagtgcagtgccgcgatcttggctcactgcaacctctgcttcccagattcaagcgattctcctgcctcagcctcccgagtagctgggactacaggcacccgccaccatgcccagctaatttttgtattttgagtagagatggggtttcaccatgttggcccagctgcactcgaactcctgaccttgtgatctgaccgcctcagcctcccaaagtgctgggattacaggtgtaagccaccatgccctgtcttttttatttttttttttgagacagggtcttgctctgttacccaggctagagtgcagtggtgtgatcttggcttattgcaaccttgaactcctgagctctagcagtcctcccacctcagcctcctgaatagctgggactacaggtgtgagccatcataccttttaataatttcaaaattaaagtaagatacatgaaattacaataaaacataacagcataacaaattactataaagtacacatccatgtaactaatacccaggtcagtaagtaggacagtaccagaatatcagaagccctttttaacctaaccttggttttgtttcatccactaatataaatgagaaatttcatatgtttgattattattattattattttttgagacggagtctcgctctgttgcccaggctggagtgcagtgtcacgatcttggctcactgcaagctccacctcccgggttcacgccattctcctgcctcagcctcccaaatagctgggactacaggtgcccgccaccacagccagctaattttttgtatttttagtagagacggggtttcatcgtgttagccaggatggtctcgatytcctgacctcgtgatccgcccgcctcagcctcccaaagtgctgggattacaggcgtgagccactgcgcccggtctgtttgattatttttttaataaataattggactttctatctaaagcttccagaatagttttttcttcattgtagcacagaaattttataattatgtgtctagcatgtatcttttctagtcagtcctgcttagaaactggtgagccattttaatgtgcaaactcaggtctttcattagggtagttttcttctaatatttgttaatcagcgcctcatgtatatatgttctcttctggaatttcttttatttaactgttaggtatcctgggtttatcttctaattctcttagctttttcttcagatttacatttctttatatttttatctttgctttaagatatttcttccacttgtccaggccagtaattctagtttcaactctaataatttactctttcaattcattttactgacattttttatttaaaataatatttattatttctaaaatgtctttgtgtgtgtatttatgttgtagttaaagcttaagtactcgttttttttgttgttgttcagattatcatctgtgtcttccagcagctctgttttgttagggtctaccttttttatttatttatttatttttttttgagacagggttttgctctgtcacccaggctggagtgcagtggcacgattttggctcactgcaacctctgccccctgagcttcagtgatcctcccacctcagcttcctgagtagctgggactacaggcacacatcagcaccaccatgcccggctaatgtttgtatttttagtagagatgaggtttgaactcaagcgatccacctgcttgtggcctcccaaatgctgagattacaggcgtgagccactgcgcccagccgagagggagaagaacttgtaccaactctagattctgacagagcttaagccttcactcacaccctatggacccctcctatctgttcatctagaagtgcgttagagttcagaatggagatgagtggggtcactttcaagctaccatctgcccacgatatggatctatattctcagcctgtttataatgtaggctggttcacttggaaggacccaaaatggcttagcagcttttctttccctactattgggtctctatatgagcaacaaagattagccaagttcttacctaagcagaggtagtaagaattcttttcttttttgagtgcactatcttgcacctgtaattgtatgtcgggaactgaattgactgccttagacaactacttttgtttcctttggcaggaaggcagcaacaactcatctccagtggattttgtaaataacaagaggacagacttatcttcagaacatttcagtcattcctcaaagtggctagaaacttgtcagcatgaatcagatgagcagcctctagatccaattccccaaattagctctactcctaaaacgtctgaggaagcagtagacccactggrcaattatatggttaaaaccatcgtccttgtaccatctccactggggcagcaacaagacatgatatttgaggcccgtttagataccatggcagagacaaacagcatatctttaaatggacctttgagaacagacgatctggtgagagaggaggtggcaccctgcatgggagacaggttttcagaagttgctgctgtatctgagaaacctatctttcaggaatctccgtcccatctcttagaggagtctccaccaaatccctgttctgaacaactacattgctccaaggaaagcctgagcagtagaactgaggctgtgcgtgaggacttagtaccttctgaaagtaacgccttcttgccttcctctgttctctggctttccccttcaactgccttggcagcagatttccgtgtcaatcatgtggacccagaggaggaaattgtagagcatggagctatggaggaaagagaaatgaggtttcccacacatcctaaggagtctgaaacagaagatcaagcacttgtctcaagtgtggaagatattctgtccacatgcctgacaccaaatctagtagaaatggaatcccaagaagctccaggcccagcagtagaagatgttggtaggattcttggctctgatacagagtcttggatgtccccactggcctggctggaaaaaggtgtaaatacctccgtcatgctggaaaatctccgccaaagcttatcccttccctcgatgcttygggatgctgcaattggcactacccctttctctacttgctcggtggggacttggtttactccttcagcaccacaggaaaagagtacaaacacatcccagacaggcctggttggcaccaagcacagtacttctgagacagagcagctcctgtgtgggtaagcgcccctatgtccttgcacctcgtgagttccattaccctggaccttcccctcccatcccttcccctccttttcttttcgtcatgttcttctctttctgctgcagccggcctccagatctgactgccttgtctcgacatgacttggaagataacctgctgagctctcttgtcattctggaggttctctcccgccagcttcgggactggaagagccagctggctgtccctcacccagaaacccaggacagtagcacacagactgacacatctcacagtggggtaagaaggttcctctcaaagcttgagggatcccagtggggatccttggaatttaagctgagaagctgccagagggcaaaggggactcctatcacaggcttatacttagaacatttgcaaaagctgagaatctgggcagtcacaatggctgatgcctgtaatcccactgctttgggaggccaaggtgggaggactgcttgaggccaggcatttgaaaccagcttgggcaacacagcgagatcccatccctacaaaagatttttaaaaaatcagctggatatggttttgcatgcctcactactcaggaggctgaggcaggaggatcatttgagcccaggaggctaaggctgcagtgagctatgatcatgggcaagacagtgaaaccctgtctcttaaaacaaaaaagctgaggatctggaaaatccccttaaagctgtgggtagtcactctacccctggggtacatcagaactttccaaaggagtgcaagcaaggaaacttttaaaggaattggtttttagatcatcatcttccacaagtattctttttcttcgttttttgcattggtagactatatttaatattttaagaaaaattatgaataagcctaaaacattttttaaaataatttttaatttttgtggttacagagttaggtaaatatattcatggagtccatgagatgttttgatataggcatgtgatggtcaataatcacatcatggaaaatggaaaatggagtatctgtatctgtcccctcaagcatttatcctttgtgttacaagcaatccaattatacttttagtttttttttttttttttttttttttgagacggagtctcactctgtcacccaggctggagtgcaatggcctggtctcggctcactgcaacctctgcctcccaggttcaagcgattctcctgcctcagcctcctgagtagctgggactacaagcgcatgccaccccacccggctaatttttgtatttttagtagagacagggtttcactatgttggccaggctggtctcgaactcctgccctcatgatccacctgcctcagcctcccaaagtgctgggattacaggcgtgagccactgcgcctggcccctgttgtttatgtgaagaagatttctcagtgtttacatctgtcagaatggaaaggagtcagctggcatagtggctcacccctgtaatctcagtactttgggagggtgaggtgggaggatcgcttgagctcaggagttcaagaccagcctgagaagtatggtgaaacctcatctctacaaaaaaatacaaaaattagctgggtgtggtggtgtgtgcctgtagtcccagctacttggaaggctgaggtggaggatcacttgaggctaggagttcaaggctgcagtgaactgagatcttgacactgcactccagcctgggcaacagagccagaccctgcctcaaaaaacagagtcacgaattgttgctgaactatttcttattgctggaattatagtaatccacagatatacgaactaataaggggaaggaatctccatcgatttcattaataggtgattcccaattaaattttgccgagcatgtttattttattagaaattatattacagtgactaatatacaactgattaaaagatttctctatcctaaagaaagctttttcactttaaagccttccggtcaaaggaatttaaaggaaattttaatttaaatttagatgaactttcattgttgttgcagagatgatggttaataacagattttatttttattttttgagatagtttcttggtctgtcacccaggctagagtaccatgttgcgatcagggctcactgaagcctcagcttccttggctcaggtgatcctcccacctcagcctcctgggtagctaggactgtaggtgtatgccaccacacctacctaatttttttgtatttttagtagagatggggttttgctatgttggccaggctgttctcaaacccctgggctcaagtgatctgctagcctttgcctcccaaagcactgggattacaggtgtgagccactgtgcccagctaataacatactttaaagcataaaaatatattacattaggctgaaattctgagaaaaataaaaaatatatgttcaaagagaaaaagggatgacataataaaatttctgactgctaagaagagctttttcttgtatttttaaaagatagcaactaggtatctcatcattttggtgtatgtagtatttatgccactggatatatttaagagtaatctaataattttattttaggctgggcatggtggctcatacctgtaatcccaacactttgggaggccgaggcgggaggatcacctgaggtcaggagttcaagaccagcctggccaacatggcgaaaccccgtctttactaaaaatacaaaaattagctgggtgtggtggagggcacctgtaattccagctacttgggaggctgaggcatgagaatcgcttgaacccgggaggcagaggttgcagtgagccaagatcgcgccactgcactccagcctggaggatagagtaagactctgtctcaaaaaaaaaaaaaattattttaaattgtcaatattggtaatatgctggacattacagcctttgcaacaatttaaacttaagggtacttagtttttgcaggaaatattagaggaaagtagctaaaagaccactgttggcccaatgtggtggctcacgcttataatcccagcactttgggaggctgaggccggcagatcacttgaggccaggagtttgagaccagcctggctaacatagtgaaaccccatctctattaaaaatacaaaagttagctgggtatggtagtgcactcctgtaatcccagctacttgggtggctgaggcatgagaattgcttgaacctaggaggtagaggttgcagtgagccgagatcacccagtgtactctagcctgggcaacagagtgaggctgtctcaaacaacaacaacaacaatgttctagaggattgtattacaacacaggcctaagaaggaagggaatggtggcaggtgaaggaattgatagcacctcaccattgtggctgttgagataataggtggctgctgctaagaagagatggtccccaaatgtgcagagacctcctttgagttgaaaatatcctcaaagtaatgaccttaccatttgccaaaaatcctggaaaccataagctccatgttcctccagctgttcaatttccctcctgttttcttatctttgtgtcctttcctcttgttcttgaccttgtttcccatccctgaatctgccatgcatcctcttcccctgaaggttgccaggtccctttgtaggccactgaagcagaaccaaagaggggaaatgacatacctttagccattctccatcagcatgccatgtccttgctgcctggctgcctccttcacattaatctcatcacctgcctgactgtccagctgagcacgatgtgagccctatccaagctcatgtgctactctgtgccttatttcacgatgcagcagtgaatgataactgctttgctggggaagggagccatgaactccaagaaatcagcagtgctgctccagtagtaacttttcccccagatgatggctgccttgcctcagtaatgaagactcccacttttctcttagaacttgtcttctggggttctactgcctttgagatcatacctacttactctatgcatactatgagttttatctatctgacccaggataatgagcagacaattaagaaagtaaaaatgatgaataaatacctaagaaggttagcattattggcaataaaaaatgcaaattgaacagtgagatgccattttcttgtgactcaatagcaaagaataaaataggtaatgctggtaagcatactctatttatctgcaggatataaattggttcatcctttttttttttttttttttttttgagacgaggtctcactctgttacccacactggagtgcagtggcacgaacatggctcactgcagcctctacctcctgggctcaagggatcctcccacctcaatccagctgagtagctgggaatataggcatgtgccaccatgcctggctaatgaaaaaaaattttttttttttgagacggagttttactcttgttgcccaggctggggtgcagtggcgtaatctcggctcactgcaaccttgcctcccggtttcaagtgattctcctgcctcagcctccggagtagctgggattacaggcacgtgccaccacgcctggctaattttgtagttttagtagacatggggtttctccatgttggtcaggctggtctcgaactcccgacctcaggtgatccgcccgccttgacctcccaaagtgctgggattacaggtgtgcgccaccgcgcccagccttttttttttttttttagagatggggtttcactgtgttgcccaggctggtcttgaactcccggacccaagtgatcctcctgcctcagcctctgaaggtgctgggattacaggcatgagtcactgtgcctggctaaacaaagaaattttttacctacctgtggatttttctttctgacttggcttcattgaattgagtactttgcttctgcttttaataggaaaggtggctgggtgtggcaggagcactttggaagtccgaggcaggaggactgtttgaggccaggagtttgagaccagccagggcaacatagcaagacctcatctctacagaaaataaaaaataaataaaataggaaaggctcctataactcactgggtgggaggaagaatgaggtgctggtggtacatgttgcctactcaaaaggaacaacttgrctggtcatggtggctcacccctgtaatcccagcactttgggaggccgagtcggtggatcacttgaggccaggagttcaagaccagcctggccaacatggtgaaaccccgactctactaaaaatatacaaattagctgggtgtggtagtgcatgcctgtaatcccagctacttgggaggctgaggcatgagaattgcttgaacctgggaggtggaggttgcagtgagctgagattgtgccactgcactccagtctggatgatagagcaagactctgtctcaaaaacaaacaaacaaacaaaacaaggaacaactctgtttttctggctagataactaataaacttcagcatcttaaggagagccatgagatgggacaggccctacagcaggccagaaatgtcatggtaagtgatgattgaccttacaccaccactgggtctcctgtgaagatgaagaatggagaatcctgggtggttagtagatggtgatactaagtcgtggtggtgaagggaggtttccaaacatttgtaaagtacatctccttatgcggagcttggaattggggttagcggttttcctccccagtgcccctgtttcctgcttagtgactttatttgatctcacctacccatttttttctctacagcaatcatgggtgcttatctctaaagagctgatatccttgcttcacctatccctgttgcatttagaagaagataagactactgtgagtcaggaggtaagcagcctgaagatggaggtggaggcctgtggtgggactaaaagccataaagaggaaccagacacattaactgattcttaccatatagtctcggcgtgcagaaacattggtctgttgctgttttgatttgctgaagaaattgagggcaaagctccagagcctcaaagcagaaagggaggaggcaaggcacagagaggaaatggctctcagaggcaaggatgcggtaaggtgacaggcatttgttcttggatgtgggaggtttccacctcaaggttcctgcaggaacacaaatgcactttagacacagatgggtggcctaagaactgcctgccctgggcagtaaagaactgatctattgaggtgtcatggttacatctttttgtgctggctcccctgttgcccactgtgkccttgcaaccacttccctcaataggcagagatagtgttggaggctttctgtgcacacgccagccagcgcatcagccagctggaacaggacctagcatccatgcgggaattcagaggccttctgaaggatgcccagacccaactggtaatttaagggcattttctttcctggggtctgtgctgacagactgggagggtagttgcatactcccactttgctgtatccaaagggaaggggttcccgcctaggcaatctttcttttgtaggtagggcttcatgccaagcaagaagagctggttcagcagacagtgagtcttacttctaccttgcaacaagactggaggtccatgcaactggatgtgagtatttgggaccatcataactaattccttactcacatcaagtcctgttgtgagctttgcctcaagtgtgctctactgacctgcttgcttcccctggtagtatacaacatggacagctttgctgagtcggtcccgacaactcacagagaaactcacagtcaagagccagcaagccctgcaggaacgtgatgtggcaattgaggaaaagcaggaggtacaaaccaagagtggggactgcttaggcttggtttccttcctaatgtgtgataccattagcctcttaccctggatctgttttcttttcaccctgtgggtttggaggccagccagtaaggtctcttagctgtaagatggccttaagcgcagttttttcctttgcccttcagcatctttacttcagcaacttttctcctgtctctactttttcctgaggatcaaccttattttctgcaatgttgatgcccaggagcaaggtagttttctgtcttgtccagaaagagaagctggaccaagtcctgggattattgattcaggaggaactataggaggaaaaccatctgttcttcctaggtttctagggtgctggaacaagtctctgcccagttagaggagtgcaaaggccaaacagaacaactggagttggaaaacagtcgtctagcaacaggtgtttgtgtgtgtgtgtgtgtatgcatgcatgtaagcatttgagccctgttaaggcttggagtgtggcactagagcaaggaagtactcaggagcacttgctttggagcagaagtttggggagtttctagcctgctgacckcatggtgtcattaggatacttttgttctagatctccgggctcagttgcagattctggccaacatggacagccagctaaaagagctacagagtcagcatacccattgtgcccaggacctggctatgaaggatgagttactctgccagcttacccagagcaatgaggagcaggctgctcagtgagttcctaacggggtactgtggcagtaggcatccaggatttaggaccaaatgggatctaatatgttgtctctggcagatggcaaaaggaagagatggcactaaaacacatgcaggcagaactgcagcagcaacaagctgtcctggccaaagaggtgcgggacctgaaagagaccttggaggtaaggaatatggcttgggccaagggagctggtaagcctcaggagtgtgattcttgcctgatagtgttgaggtaaggtttgagactgtgaactagaaaaagcctctgtacccagggcactaaaattctccctccctgtcttgctccttctcttgtcttcccagtttgcagaccaggagaatcaggttgctcacctggagctgggtcaggttgagtgtcaattgaaaaccacactggaagtgctccgggagcgcagcttgcagtgtgagaacctcaaggacactgtagagaacctaacgtaagttctctaactttctgtacttccccctaagtgcttatttttttctcaggaacacttctagaagccaaaatctccaagaagagaactgtgagtgttgagcctcttgtttctctcctttaatgcagctctgtggggatttgggataggcgttcagagaaggtaatttggtctttggtcatcttccctgttccttatttcagggctaaactggccagcaccatagcagataaccaggagcaagatctggagaaaacacggcagtactctcaaaagctagggctgctgactgagcaactacagagcctgactctctttctacagacaaaactaaaggagaaggtaggatcctggggttccttctcttctcttccaattgtatctttattttacagatagtcttcctaaaacattactctttttctaactgtgaccttttatgatttcagttacctacaggacctcattagcctgttgctcaaacctttcttcccctgtctcctatctccctattatgaacactttgccccagctagactgcctgtatgctacacacatgtccccatttttatccccagaacccagactctggctgttcccacattcattctattctttcttcaaactggaaatgccttttctattaaaatcctcccttccgacctgggcaacgtggtgaaaaccatctctacaaaaaaatacagaaattagcccaggtgtagtgttgtgaacctgtagtcccagctatctgggaggctgaggtgagaggatcacctgagcctgggaagttgaggctgcagtgagccatgatcatacctggctaatttttttgtatcactgcactccaaactgggtgagagtgaaaccctttcccccacaaaaaaagaaatcttccctggtttaccttytttgaactgttcccaaatcaaatcatgtggacccggtgatcttttcttctgccatatttctcatgaacttactcttcttttgtatttgtattaattttccttggatacctggtctcttcaaccagactatgtttcaagaaagcagaaatatagccttctttggcctccctgcagtgtgcactaaacaataaatggttgacatcattcagaatacaaaggtaattagcttattcagcagataaggcacaacaaatatcctaaaatctggcaattgcttatgacctgatcctcttccccaactgggtaccgagcacaggaaatgccatcaaatctacagtttagcatggaagacaaacagatgtaaacttgtcatcttgacttatgatcatggtagaggtctgcatggaccactgtgagagatagagaggggagcaccacttcagccttcgagaattaggatgccttctcaaagcagctgaccttgggtacagtcttgaggtttagacgtttgtggggcaggggagggtatttaggaagtcccactaggcagagggaacggtgtatgaaagtttcatctgactacatatgagagtcgtacgtagaaagtcatgcacatagtacatgatgtgttcttttttatagtgtctaccttataaaacctgggttaggtgctgggactagaggatgaacaaggcaagatgctgctcatatggaatgcagcaagtctgaggaatgggaagcagctcttcatggctgcagcgtgagagctctgtggggcaaggcaggagacaacactggagaagtaggcaggaggccagattttgaaggcttgaaataatggcagttttataggcagtagaaaggagaggatggagtgaatggattcaatagatatttaggaagcagaggcagtagaaccaatttgatgtaagagtgaccaatttgatgtgagagtaagttagaagagtgaatgatgatccttagattgctaggaaagagggcccagcgggtcagctgtgttagtgtgtggagactagggctagtgacacctccgggtcagctctgtgcccaggaagcacttcaacctgtktggcaggagggatagcaataggaagcacttcaattccccacaactcagacacccagacgggagggcagaggaccaaggctgaaaggagtagagagcctgagagagagatgagactgaggggagctagtggtgactcaggctaaccagtcagcgggagagacctagaccggggggcagagaaggcgggagaactggagagaggacctagcctaggaggagagggagcaggctgagaaggaaatgctctgggtaggagagacagactccaaggaaaaatccaacaagtagaggaggatttgggattggaaaagctgaggtccagctgggagagctgaagagggatagaacagaagaggttgagccatggggtttcaagtacgcggaaaggagcaaagatgttaggaaagggtcgaaagggcacatcccggagtcccaggtagcaggacgaggatggcaggggaagagccaaggaaatgaagcggagatgttgagtggctcccgccttgcctggccttacctgtgcgcagccagttagcagccgcagccacaagcacagctacttcaggactgaggccagcaagcttttcctataaatggccatataataagtatttttggctttttgggccatatggtctctgtctcaactactcaattctgcctttgtagttcaagagcagccatagatgatacagccattaatgggtctggctgtgttccaataaaactttatttacaaaaatagttggcaggctagatttgacctgtaggccacaatttgctagccttccctctccctgctctagaatagtaaatacaggagtaggaacagacttttgatagggtgttccctatcagggcacagggaaaatggtgaactcagcttcatacatactaagttgacagattgactgtggaaccttctggtagattcttcacaggcagttagcctttgagtctgcagactgggaaaaagactgggaaaaagttgagagagggatggaagagtcattcatgtggaagggaagtttgaagtagatgtttttgtgatgctcccaaggcaaggccaccctgggaatgaattagagtaaatttagggccaaggacttaacccagaggatccagcagttaaggaaggacctgtgaatagagaagaaataaccagaaaggtgtggggcctgcctttaaaggagagagactcatgtcytggaagctaagaaaaggaagtttctaaaagaacaatgtggtcatcaatatcaaataggtcaggtaaaacaagagctgaaatatatgcattgcatttgaaagtaaggctgccattggtgaaccaaatgacaagaatttaggtggaatgacaggggagaagcctgagtgtagtgggctggggagtcaatagatggtgagagttataaacaagaagtataggctctttttttctttcttttttctttctttcctttctttctagaaaaggcagtagctaaaaggggatttaaggtaagaagaagggttttgttttgttttgtttaggtttgtttttaaaatactgctgtttttgttggagaggcttaagaatataaacatgttcagagaaaggcactaatggagaagttgaagatagagaattgagataataggtggaacagcattttggaggagatggctgggagttacctggaagcccaggagttcactagacctgaacagcagctattttttcttctttgcccttagactgaacaagagacccttctgctgagtacagcctgtcctcccacccaggaacaccctctgcctaatgacaggaccttcctgggaagcatcttgacagcagtggcagatgaaggttaaaggccctgggatttgggggtgggaaagttgtgacgctgctcctgatatcttctgctgttgaagatgtccaccagcggrcttgtctatcttaccctggcttccattatggtagacccctgcctggatcatcagaggggccctctcccattattggtttttctcttagagccagaatcaactcctgtgcccttgcttggaagtgacaagagtgctttcacccgagtagcatcaatggtttcccttcagcccgcaggttaggaggggctccagggatcctgcctcatttctagaaaatctggtggtgatgagtaaagacgaaagcagtgagaagtgctttgctctaaaaacctcaattctacttgggctcattttatttctgccttctgggatctgtaatgttccagacattcaaatcctgtgggtggggaacacggataagagttgtggaaatgatggctatacactccttccttccagggctggaaggctagacctctatctgggactttctctttcagagaccccaggcatggaggagagcctggcagaaatgagtattatgactactgagcttcagagtctttgttccctgctacaagagtctaaagaagaagccatcaggactctgcagcgaaaaatgtgagtgggatgcagttttggtgacagagggacagtgagacatcctcttatgccaagggtccaactgatccctgagaggacaggaatgttgctaaattcttccttccttcagttgtgagctgcaagctaggctgcaggcccaggaagaacagcatcaggaagtccagaaggcaaaagaagcagacatagagaagctgaaccaggccttgtgcttgcgctacaaggtgaaggagggacctagaagtggggcgatgaagaactggggcagctctactggcccactgggagccattatctctccaggaatctgggtggtggggattttccaaccactgccctagttttgcccttcctggggtcagacatttcacatgtcagctatgggctgacctgtcttcccaggctgactcaggagagaagtcaggaactctagcagagctctcccaacactgaaaygtgccttgcctggcttggccctggggaaagaattggcgtgatatcaattggtcccatgtgggctaagcatgggtcaggcactctctcctacctcctggcaagggctgtgaagagaccagctcttcatgtgtcttctcacctccctttccctcacagaatgaaaaggagctccaggaagtgatacagcagcagaatgagaagatcctagaacagatagacaagagtggcgagctcatagtatgttcaccatcatgcccaggcctttgccttctgtgttactggtcagccaggatcccaagtatgagaaatggtttgcttttgttcaccacatgttgtctatccttatgtcctattggacacctctccattctcattcccagagccttagagaggaggtgacccaccttacccgctcacttcggcgtgcggagacagagaccaaagtgctccaggaggccctggcaggccagctggactccaactgccagcctatggccaccaattggatccaggagaaagtgtggctctctcaggaggtgactcagagttaacagaggagctggacagcaggtggggaccccaggctgtacccctgttgatctggacatatttctaggtggacaaactgagagtgatgttcctggagatgaaaaatgagaaggaaaaactcatgatcaagttccagagccatgtaagaatgtccatgccattccagggccatttcctaccatcgttaacaaatgcccygccatgtttcccctgtcctaccaagtttgctcttttatgcataggacttataaaatctgtttgctttctagagaaatatcctagaggagaaccttcggcgctctgacaaggagttagaaaaactagatgacattgttcagcatatttataaggtataggcaggagggaggtgatatcactaatgaacctggtacaaggcctggccccaggaggtactaatgagcacagatctggttcccagcctgtgctgagagcygggcctgaatcactattgcaggcttctctgtggtgtctgttttctcccctctaattcagcggctgcctcctggggctgggagccctgggccttaagtctgtggtcctgagctgcgttttctgcctctcttcccagaccctgctctctattccagaggtggtgaggggatgcaaagaactacagggattgctggaatttctgagctaagaaactgaaagccagaatctgcttcacctctttttacctgcaatacccccttaccccaataccaagaccaactggcatagagccaactgagataaatgctatttaaataaagtgtatttaatgaatttctccaagcttacggaatcttactttttgggtgagagggggcggatgatgaagtcagggaagaagcagcttgggcctcctgcctgggcaccctccatagatccctctccacctcctgctgcatccaaagccaaggctgcctgcccttcctcccttcctctgctttcaccaaaactctgggcactggactgcttgttccctggctcaccgcctggaggaaacagaaaggcttcattctcttactttccccagccccctcgggggtataccctggcaaatatgggggtgaggacagagaagctcagttcattacttcctgccctgaacttgggcaccttgaagatgcttctgccccacctactcaacctgttgttactgttctggtgcctcctcttcaccagactaagcttaatccccagcatccagcaagtgcccggcacgtggtaaagggattgtggcagaaatgaacgcaaggtcatggccaggctccccgaggtgggagggcagtccctaacagccacggatgcctggcggggcgctcactccacctcgccgccccgcctctgagggcgtggtcttgccccggacaccagtcctggggagggggtgtggtcagggcggggcatgcaggccacgcccccggaggagtcacgtagctctgcgacatccgcagcctcatttaccagagggagccagggctgcagcctcatctgtttgcggatcagaacccgagctgtgcttgtggctgcggctgctaactggctgcgcacaggtaaggccaggcaaggcgggagccactcaacatctccgcttcatttccttggctcttcccctgccatcctcgtcctgctacctgggactccgggatgtgccctttcgaccctttcctaacatctttgctcctttccgcgtacttgaaaccccatggctcaacctcttctgttctatccctcttcagctctcccagctggacctcagcttttccaatcccaaatcctcctctacttgttggatttttccttggagtctgtctctcctacccagagcatttccttctcagcctgctccctctcctcctaggctaggtcctctctccagttctcccgccttctctgccccccggtctaggtctctcccgctgactggttagcctgcatcaccactagctcccctcagtctcatctctctctcaggctctctactcctttcagccttggtcctctgccctcccgtctgggtgtctgagttgtggggaattgaagtgcttcctattgctatcctcctgccaaacaggtgaagtgcttcctgggcacagagatgacccggaggtgtcactagccctagtctccacacactaacacagctgacccgctgggccctctttcctacatcactgcagccccactggggccaacctctggtactgggtgggaataggcaataggcataggcaggcaggtttggagtacagaaaaggagaagctgcaggagcctgtgactggtatttgtgccactcctactccctacctgttcttccaaccttttcctctagaagctgagagaagagggtggcaataagtacttttgcctcattctgaagccttggaagtaagtacactttccctaggggtcctgtggaggatgagaaaagggaagctggaaaggccaggacttttgcctacctcaacaagggaccaagttcagtgaaagaagggttggcatccttgattgggcagcagatttatcagaagagctgtggcttcagggctgctcacctccccacccccaccctgcatctttccccagggctgggaaggatgcctaccagggacaaaaggagatgtgggaactggagccctaagcttgctagctgtcagaaggactggtgccacttgatgcccaggactcatgccaaggactgctgccctgttcccagccccttgcttgatggggaggccatttggcccatctggccaggagaggcagcagagggtgaggtctggcttttttatcttgtctccactccagggagctgtcaccatgcctcactcgtacccagccctttctgctgagcagaagaaggagttgtctgacattgccctgcggattgtagccccgggcaaaggcattctggctgcggatgagtctgtaggtaagtggacatctgtagccaggtagggtacaggtggctaggggaccctggggatgttctcactgcctctctttgtttgcccctaggcagcatggccaagcggctgagccaaattggggtggaaaacacagaggagaaccgccggctgtaccgccaggtcctgttcagtgctgatgaccgtgtgaaaaagtgcattggaggcgtcattttcttccatgagaccctctaccagaaagatgataatggtgttcccttcgtccgaaccatccaggataagggcatcgtcgtgggcatcaaggtgcagcccctggccctgctctgaatggaagctgggtgtgaaaataagcttgtgtaggaggggtagcaaggagaatcctgcctggattcaaccctctgcttgtacttcctctacaggttgacaagggtgtggtgcctctagctgggactgatggagaaaccaccactcaaggtataggatgggtgggcttgaggaccaaagaggtgttagatagttgatgctggtaaaagaggggcagagtaatgaggttggcactgtgcttgcagggctggatgggctctcagaacgctgtgcccaatacaagaaggatggtgctgactttgccaagtggcgctgtgtgctgaaaatcagtgagcgtacaccctctgcacttgccattctggagaacgccaacgtgctggcccgttatgccagtatctgccagcaggtgtgtgtgttgggagggtggtgagctaggtgccctgtatgcctggtggggagagagtcacaaggctttcttcatctcccctactgcccctcccaagcatctctgctcttgcctgcagaatggcattgtgcctattgtggaacctgaaatattgcctgatggagaccacgacctcaaacgttgtcagtatgttacagagaaggtgagtccacacctgggcacacaaacatactgcagggacagctcggcaggagtgtctgttccccagaacccccagcttagatccaggcacactttcccctagcactttttcacttcatcccggcacaggcctgtgatctgagcctgtactgagccctcacagtctgtgcccatctacccctacatagggagcatcgagcagtaaccagtgggggcccagacccttagtaaacctcctctaatccccacccaggtcttggctgctgtgtacaaggccctgagtgaccatcatgtatacctggaggggaccctgctcaagcccaacatggtgaccccgggccatgcctgtcccatcaagtataccccagaggagattgccatggcaactgtcactgccctgcgtcgcactgtgcccccagctgtcccaggtactacccagctccctaacctgctcctatccctaaggcccatcttcaggtccttcttgtggccttcaggggttccctatcctggaaaaattgggagtgaccagtcagtttgtcttctctcctccacactaggagtgaccttcctgtctgggggtcagagcgaagaagaggcatcattcaacctcaatgccatcaaccgctgcccccttccccgaccctgggcgcttaccttctcctatgggcgtgccctgcaagcctctgcactcaatgcctggcgagggcaacgggacaatgctggggctgccactgaggagttcatcaagcgggctgaggttgggagctacaggtggtggtgggtgggggcagcacccagaggctatagcctgggcagggcttggcacctgtgggctggctcagcctgcttactccacgctcccttttgcaggtgaatgggcttgcagcccagggcaagtatgaaggcagtggagaagatggtggagcagcagcacagtcactctacattgccaaccatgcctactgagtatccactccataccacagcccttggcccagccatctgcacccacttttgcttgtagtcatggccagggccaaatagctatgcagagcagagatgccttcacctggcaccaacttgtcttcctttctctcttcccttcccctctctcattgctgcacctgggaccataggatgggaggatagggagcccctcatgactgagggcagaagaaattgctagaagtcagaacaggatggctgggtctccccctacctcttccagctcccacaattttcccatgatgaggtagcttctccctgggctctccttcttgcctgccctgtctcctgggatcagagggtagtacagaagccctgactcatgccttgagtacataccatacagcaaataaatggtagcaaaacattctactttgcctgtctgttttacacatcaaattcccacctcccagtttctgatctctgctaattctatctctgggccctctgactctggaggtggagagggtgggatttgagtcttactgggcttcaagttatggaggaagggcacatgcagtcaccatccccagctcaggctcttgctctcttgatgtccaagtctggagtggggcaatgaggaagactgcaagtcttctagggactgccacatcagtggcactgggctgcagctacagaagtatggagtgaggccaaactggcaactcctgaaggcagatttgtgcaaggctcaaagcagggaggcagcaagacaggctgggataagagtgggtgggagtctctcccatctcgcagtgttaagcccagctgggacctggtaccttccactagggtgagccacaccagtaagggcaagcgagcacctggactcccgcccaaagaggaaaaccaaggctctgcgggctgccagggctgagcagggcatctaggaggttgccaagggctatggcccattttcatttggggtagaagtgggcacaaagggagccaattggagggtctgggtaaggacagctctggtgaggcctgatgctgaactttaaccactgggctgggttgtgaggtaggctgagaacctgggtctaagcagataaaaagaagagataacaagctgcgtgtgttctgtgtcaactggggaggctacaaatgctccaccctgtgtggcctgactttataataacaaaaatagcttgcacatagcaccaaccctgttctaatcactttatatgtactgacacatttcatacaactctataaagtaggtactattactatcatccctattttaatagagaaaacaggcacagataggcacagaacgatcttctcacgatcactcacctaataagtgatgaagccaggatttgaaccgcagtgatcagcatctagagtctgggctcatgacttttcaagatttttaagtgaagtattctgagttttccaagttggaaatgaattaaaacgtattttaaaatagcgagagagccaattgtgctaaaacatactagcttgctacctccgtgtttgaggctttgaggagagggcaccctaagaggagttctacgataaggataataagaccgtgacagttgacgttgagggctttccgtgtgccaggctccttacaagaacggcctcatttatgtaaatatctccattttcagatgagcctcggagctgcctgtagttgcccagctagtatttaaggactgcagaggttgcgctcttgattgcggggctagaagtgtgttctacagggaagcggggaacttcgttccagcagcgccgaaacccgcacggcccctaggctgtccctccgcgcccgggtgacttcctttcagatccccagcgaagctcccagcggagccctcccacccctcgcccgcttgctcccgtctgcgggtctggagtagcgctcgcgattggccccgatca
